(19) United States
(12) Patent Application Publication
(10) Pub. No.: US 2025/0034559 A1
(43) Pub. Date: Jan. 30, 2025

(54) COMPOSITIONS AND METHODS FOR THE TREATMENT OF TAU-RELATED DISORDERS

(71) Applicant: Voyager Therapeutics, Inc., Lexington, MA (US)

(72) Inventors: Mathieu Emmanuel NONNENMACHER, Boston, MA (US); Matthew Alan CHILD, Ashland, MA (US); Jinzhao HOU, Lexington, MA (US); Jiangyu LI, Watertown, MA (US); Shaoyong LI, Hopkinton, MA (US); Tyler Christopher MOYER, Boston, MA (US); Wei WANG, Arlington, MA (US); Brett FOFFMAN, Braintree, MA (US); Elisabeth KNOLL, Melrose, MA (US); Yanqun SHU, Winchester, MA (US); Nilesh Navalkishor PANDE, North Grafton, MA (US); Jeffrey Scott THOMPSON, Stoneham, MA (US)

(21) Appl. No.: 18/711,059

(22) PCT Filed: Nov. 17, 2022
(86) PCT No.: PCT/US2022/080040

§ 371 Date: May 16, 2024

Related U.S. Application Data
(60) Provisional application No. 63/280,485, filed on Nov. 17, 2021.

(51) Int. Cl. C12N 15/11; A61K 31/7088; A61K 45/06; A61P 25/28; C07K 16/18; C12N 5/071

(52) U.S. Cl. CPC C12N 15/11; A61K 31/7088; A61K 45/06; A61P 25/28; C07K 16/18; C12N 5/0602; C12N 2510/02; C12N 2750/14142; C12N 2750/14171

(57) ABSTRACT

The disclosure provides compositions and methods for the preparation, manufacture and use of an adeno-associated virus (AAV) particle for the vectorized delivery of an antibody molecule that binds to tau.

### RELATED APPLICATIONS

[0001] This application claims priority to U.S. Provisional Application No. 63/280,485 filed on Nov. 17, 2021; the entire contents of which are hereby incorporated by reference in their entirety.

### FIELD OF THE DISCLOSURE

[0002] Described herein are compositions and methods relating to AAV particles for delivery of an anti-tau antibody molecule for use in the treatment of tau-related disorders (e.g., tauopathies).

### BACKGROUND

[0003] Tauopathies are a group of neurodegenerative diseases characterized by the dysfunction and/or aggregation of the microtubule associated protein tau. Tau is normally a very soluble protein known to associate with microtubules based on the extent of its phosphorylation. Tau is considered a critical component of intracellular trafficking processes, particularly in neuronal cells, given their unique and extended structure. Hyperphosphorylation of tau depresses its binding to microtubules and microtubule assembly activity. Further, hyperphosphorylation of tau renders it prone to misfolding and aggregation. In tauopathies, the tau becomes hyperphosphorylated, misfolds and aggregates as neurofibrillary tangles (NFT) of paired helical filaments (PHF), twisted ribbons or straight filaments. These NFT are largely considered indicative of impending neuronal cell death and thought to contribute to widespread neuronal cell loss, leading to a variety of behavioral and cognitive deficits.

[0004] Several approaches have been proposed for therapeutically interfering with progression of tau pathology and preventing the subsequent molecular and cellular consequences. Given that NFT are composed of hyperphosphorylated, misfolded and aggregated forms of tau, interference at each of these stages provides targets that can be pursued. Introducing agents that limit phosphorylation, block misfolding or prevent aggregation are promising strategies. It has also been suggested that introduction of anti-tau antibodies can prevent the trans-neuronal spread of tau pathology.

[0005] There remains a need for anti-tau antibodies for use in tauopathy treatment, diagnostics, and other applications. The present disclosure addresses this need with related compounds and methods described herein.

### SUMMARY

[0006] The present disclosure addresses the need in the art for improved methods for delivery of antibodies and antibody-based therapeutics targeting tau by providing novel AAV particles having viral genomes engineered to encode anti-tau antibody molecules and antibody-based compositions and methods of using the same for the treatment, prevention, diagnosis, and research of diseases, disorders and/or conditions associated with tau pathology.

[0007] In one aspect, provided herein is an isolated, e.g., recombinant, AAV particle comprising an AAV capsid variant and a nucleic acid comprising a transgene encoding an antibody molecule which binds to tau (e.g., human tau), wherein the AAV capsid variant (i) is enriched 5- to 400-fold in the brain (e.g., a brain region of an NHP) compared to SEQ ID NO: 138; (ii) transduces a brain region (e.g., dentate nucleus, cerebellar cortex, cerebral cortex, brain stem, hippocampus, thalamus and putamen), wherein, e.g., the level of transduction is at least 5- to 10,000-fold greater as compared to a reference sequence of SEQ ID NO: 138; (iii) delivers an increased level of a payload to a brain region (e.g., frontal cortex, sensory cortex, motor cortex, putamen, thalamus, cerebellar cortex, dentate nucleus, caudate, and/or hippocampus), wherein, e.g., the level of the payload is increased by at least 500- to 10,00-fold; (iv) delivers an increased level of a payload to a spinal cord region (e.g., cervical, thoracic, and/or lumbar region), wherein, e.g., the level of the payload is increased by at least 10- to 900-fold, as compared to a reference sequence of SEQ ID NO: 138; and/or (v) delivers an increased level of viral genomes to a brain region (frontal cortex, sensory cortex, motor cortex, putamen, thalamus, cerebellar cortex, dentate nucleus, caudate, and/or hippocampus), wherein, e.g., the level of viral genomes is increased by at least 5- to 50-fold as compared to a reference sequence of SEQ ID NO: 138. In some embodiments, the level of payload is measured using qRT-PCR or RT-ddPCR.

[0008] In another aspect, provided herein is an isolated, e.g., recombinant, AAV particle comprising an AAV capsid variant and a nucleic acid comprising a transgene encoding an antibody molecule which binds to tau, wherein the AAV capsid variant comprises (a) the amino acid sequence of any of SEQ ID NO: 3648-3659 or a sequence provided in Table 20, (b) an amino acid sequence comprising at least 5, 6, 7, 8, or 9 consecutive amino acids from the amino acid sequence of any of SEQ ID NO: 3648-3659 or a sequence provided in Table 20, (c) an amino acid sequence comprising at least one, two, or three but no more than four modifications, e.g., substitutions, (e.g., conservative substitutions), insertions, or deletions, relative to the amino acid sequence of any of SEQ ID NOs: 3648-3659 or a sequence provided in Table 20, or (d) an amino acid sequence comprising at least one, two, or three but no more than four different amino acids relative to the amino acid sequence of any of SEQ ID NOs: 3648-3659 or a sequence provided in Table 20. In some embodiments, the capsid variant comprises the amino acid sequence of SEQ ID NO: 138, or an amino acid sequence with at least 95% sequence identity thereto.

[0009] In another aspect, provided herein is an isolated, e.g., recombinant, AAV particle comprising an AAV capsid variant and a nucleic acid comprising a transgene encoding an antibody molecule which binds to tau (e.g., human tau), wherein the AAV capsid variant comprises: (i) the amino acid sequence of PLNGAVHLY (SEQ ID NO: 3648); (ii) an amino acid sequence comprising at least 5, 6, 7, 8, or 9 consecutive amino acids from the amino acid sequence of PLNGAVHLY (SEQ ID NO: 3648); (iii) an amino acid sequence comprising at least one, two, or three but no more than four modifications, e.g., substitutions (e.g., conservative substitutions), insertions, or deletions, relative to the amino acid sequence of PLNGAVHLY (SEQ ID NO: 3648); or (iv) an amino acid sequence comprising at least one, two, or three but no more than four different amino acids relative to the amino acid sequence of PLNGAVHLY (SEQ ID NO: 3648). In some embodiments, the capsid variant comprises the amino acid sequence of SEQ ID NO: 138, or an amino acid sequence with at least 95% sequence identity thereto.

[0010] In yet another aspect, provided herein is an isolated, e.g., recombinant, AAV particle comprising an AAV capsid variant and a nucleic acid comprising a transgene encoding an antibody molecule which binds to tau (e.g., human tau), wherein the AAV capsid variant comprises an amino sequence comprising the following formula: [N1]−[N2], wherein: (i) [N1] comprises X1, X2, X3, X4, and X5, wherein: (a) position X1 is: P, Q, A, H, K, L, R, S, or T; (b) position X2 is: L, I, V, H, or R; (c) position X3 is: N, D, I, K, or Y; (d) position X4 is: G, A, C, R, or S; and (e) position X5 is: A, S, T, G, C, D, N, Q, V, or Y; and (ii) [N2] comprises the amino acid sequence of VHLY, VHIY, VHVY, or VHHY; and/or an amino acid modification, e.g., a conservative substitution, of any of the aforesaid amino acids in (i) and/or (ii).

[0011] In yet another aspect, provided herein is an isolated, e.g., recombinant, AAV particle comprising an AAV capsid variant and a nucleic acid comprising a transgene encoding an antibody molecule which binds to tau (e.g., human tau), wherein the AAV capsid variant comprises one, two, three, four, or all of: (i) an [N1], wherein [N1] is: SLNGA, QLNGA, ALNGA, PLNGS, PVNGA, PLNGA, PLNGG, PLNGT, PLDGA, QLNGS, PLNGN, SLDGA, HLNGA, ALNGT, PINGA, ALDGA, PLNCA, PLNGQ, PLDSA, RLDGA, QLNGN, PLNGY, PLDSS, PLNGC, PLYGA, TLNGA, PVDGA, PLKGA, PLNGD, KLDGA, PHNGA, PLNGV, PLNAA, QLNGY, PLDGS, LLNGA, PLNRA, PLIGA, PRNGA, or ALNGS; (ii) an [N2] wherein [N2] is: VHLY, VHVY, VPLY, VNLY, VHRY, VHIY, VHHY, FHLY, LHLY, DHLY, VQLY, IHLY, VDLY, AHLY, VLLY, GHLY, VRLY, or VYLY; (iii) an [N3] wherein [N3] is: AQAQ, SQAQ, AQPQ, AQSQ, AKAQ, AHAQ, AQAP, DQAQ, APAQ, AQAK, AQAH, AQEQ, ALAQ, ARAQ, or TQAQ; (iv) an [N4] wherein [N4] is: TGW, TGL, TGS, TGG, TAW, TGR, TAS, LSS, TSS, SSL, SSS, TLS, TVS, VSS, TSP, VSP, TMS, LSP, VAS, TAL, TTS, TLP, VLP, RGW, LSG, LAS, SSP, LLP, STS, TSA, TTP, SAL, LGS, VTP, VSA, IGW, TGF, LTP, TLA, LSA, TVG, TAP, TMP, TSL, VQS, SSM, SLP, VSQ, RSS, TST, VMS, TTA, TQP, LST, LAP, TVA, RLS, TGY, TSG, TAG, VMP, TSQ, TMA, VGS, TSW, TGV, TGT, TLG, LMP, VQP, TGM, SMS, SQL, IGS, RSV, TAA, STP, LSQ, TAQ, TGP, ASP, VSG, SAP, TLQ, LQP, TAT, TGQ, ATS, IGG, VAA, TSM, TVW, TAM, TGA, VAT, QSP, TQA, VQA, RSP, LAT, VAQ, LAA, RST, RTL, LGT, LMS, LGP, RTS, SQP, VLG, SVS, TMQ, SAV, LAG, SGP, TNS, RLT, TTQ, SAA, TSV, RLG, RAS, STQ, CSP, SAG, ALP, VTS, ISP, SVG, LTS, TTT, RSG, TQL, LNP, TVQ, IAS, LAQ, LSR, LSN, TTG, TSN, SMA, TKS, SVA, TQQ, VQQ, RLP, SAM, TAV, TQW, SSR, TQT, VNS, RSA, LMG, RQS, LVG, VTA, RTT, SMG, VMA, TKP, SAQ, NSP, ATP, VAG, RGS, VKP, RMS, NLP, NAL, RTP, RQL, VQG, VTG, VST, NAS, RVE, ATG, AMS, RNS, VMQ, SMQ, LQQ, TMG, LGQ, TSH, AAP, RSQ, TYS, ITP, VAK, TQM, TKA, SQQ, ISG, VSR, RTA, RML, SQM, VAN, CTP, ISS, AGP, TAK, RTG, LHP, TMT, AQP, QAP, RQP, LKS, NTT, TSK, RYS, KSS, NTP, VGG, IAA, LMA, MAP, VHP, VLS, LAN, ATQ, TNA, TAN, VSN, AAA, AVG, LTA, SAN, RAG, RQG, TLR, LSH, SAF, RAA, IQP, ILG, VNG, SVQ, LSK, TNG, RTQ, TMN, RGG, TTR, VRP, VKA, LAR, NQP, TMK, TYA, TQK, TTK, IAG, TQN, LAH, NTQ, RQQ, RAQ, TKQ, TQH, TNQ, LMQ, VNA, VQT, TQR, VGK, VKQ, IQS, LQR, TMM, VGN, RIG, SAK, RIA, VQN, NVQ, RIP, NAQ, NMQ, TPS, LTN, VTK, PGW, LPP, SPP, TPA, TGC, VPP, TPT, TPW, TPP, RPP, TPQ, TPR, TPG, VPA, VPQ, RPG, KGW, TRW, TAR, IPP, RSL, LVP, KGS, VAP, KGG, KAW, PGS, TRL, or AGW; and/or (v) an [N5] wherein [N5] is: VQN, VKN, VQT, VQK, DQN, VQH, GQN, VQI, VHN, FQN, LQN, VLN, VRN, VQS, VQY, AQN, VEN, VQD, VPN, IQN, VKK, DKN, VKT, VQP, EQN, GQT, FQK, GHN, or VPH; and/or wherein the AAV capsid variant comprises an amino acid modification, e.g., a conservative substitution, of any of the aforesaid amino acids in (i)-(v).

[0012] In yet another aspect, provided herein is an isolated, e.g., recombinant, AAV particle comprising an AAV capsid variant and a nucleic acid comprising a transgene encoding an antibody molecule which binds to tau (e.g., human tau), wherein the AAV capsid variant comprises one, two, three, four, or all of: (i) an [N1], wherein [N1] is: SLNGA, QLNGA, ALNGA, PLNGS, PVNGA, PLNGA, PLNGG, PLNGT, PLDGA, QLNGS, PLNGN, SLDGA, HLNGA, ALNGT, PINGA, ALDGA, PLNCA, PLNGQ, PLDSA, RLDGA, QLNGN, PLNGY, or PLDSS; (ii) an [N2] wherein [N2] is: VHLY or VHVY; (iii) an [N3] wherein [N3] is: AQAQ, SQAQ, AQPQ, or AQSQ; (iv) an [N4] wherein [N4] is: TGW, TGL, TGS, TGG, TAW, TGR, TAS, LSS, TSS, SSL, SSS, TLS, TVS, VSS, TSP, VSP, TMS, LSP, VAS, TAL, TTS, TLP, VLP, RGW, LSG, LAS, SSP, LLP, STS, TSA, TTP, SAL, LGS, VTP, VSA, IGW, TGF, LTP, TLA, LSA, TVG, TAP, TMP, TSL, VQS, SSM, SLP, VSQ, RSS, TST, VMS, TTA, TQP, LST, LAP, TVA, RLS, TGY, TSG, TAG, VMP, TSQ, TMA, VGS, TSW, TGV, TGT, TLG, LMP, VQP, TGM, SMS, SQL, IGS, RSV, TAA, STP, LSQ, TAQ, TGP, ASP, VSG, SAP, TLQ, LQP, TAT, TGQ, ATS, IGG, VAA, TSM, TVW, TAM, TGA, VAT, QSP, TQA, VQA, RSP, LAT, VAQ, LAA, RST, RTL, LGT, LMS, LGP, RTS, SQP, VLG, SVS, TMQ, SAV, LAG, SGP, TNS, RLT, TTQ, SAA, TSV, RLG, RAS, STQ, CSP, SAG, ALP, VTS, ISP, SVG, LTS, TTT, RSG, TQL, LNP, TVQ, IAS, LAQ, LSR, LSN, TTG, TSN, SMA, TKS, SVA, TQQ, VQQ, RLP, SAM, TAV, TQW, SSR, TQT, VNS, RSA, LMG, RQS, LVG, VTA, RTT, SMG, VMA, TKP, SAQ, NSP, ATP, VAG, RGS, VKP, RMS, NLP, NAL, RTP, RQL, VQG, VTG, VST, NAS, RVE, ATG, AMS, RNS, VMQ, SMQ, LQQ, TMG, LGQ, TSH, AAP, RSQ, TYS, ITP, VAK, TQM, TKA, SQQ, ISG, VSR, RTA, RML, SQM, VAN, CTP, ISS, AGP, TAK, RTG, LHP, TMT, AQP, QAP, RQP, LKS, NTT, TSK, RYS, KSS, NTP, VGG, IAA, LMA, MAP, VHP, VLS, LAN, ATQ, TNA, TAN, VSN, AAA, AVG, LTA, SAN, RAG, RQG, TLR, LSH, SAF, RAA, IQP, ILG, VNG, SVQ, LSK, TNG, RTQ, TMN, RGG, TTR, VRP, VKA, LAR, NQP, TMK, TYA, TQK, TTK, IAG, TQN, LAH, NTQ, RQQ, RAQ, TKQ, TQH, TNQ, LMQ, VNA, VQT, TQR, VGK, VKQ, IQS, LQR, TMM, VGN, RIG, SAK, RIA, VQN, NVQ, RIP, NAQ, NMQ, TPS, LTN, VTK, PGW, LPP, SPP, TPA, or TGC; and/or (v) an [N5] wherein [N5] is independently chosen from VQN, VKN, VQT, VQK, DQN, VQH, GQN, VQI, VHN, FQN, LQN, VLN, VRN, VQS, VQY, AQN, VEN, VQD; and/or wherein the AAV capsid variant comprises an amino acid modification, e.g., a conservative substitution, of any of the aforesaid amino acids in (i)-(v).

[0013] In yet another aspect, provided herein is an isolated, e.g., recombinant, AAV particle comprising an AAV capsid variant and a nucleic acid comprising a transgene encoding an antibody molecule which binds to tau (e.g., human tau), wherein the AAV capsid variant comprises [A][B], wherein [A] comprises the amino acid sequence of PLNGA, and [B] comprises X1, X2, X3, X4, wherein: (i) X1 is: V, I, L, A, F, D, or G; (ii) X2 is: H, N, Q, P, D, L, R, or Y; (iii) X3 is: L, H, I, R, or V; and (iv) X4 is Y; and/or wherein the AAV capsid variant comprises an amino acid modification, e.g., a conservative substitution, of any of the aforesaid amino acids in (i)-(iv). In some embodiments, the AAV capsid variant further comprises one, two, or all of an amino acid other than T at position 593 (e.g., a V, S, L, R, I, A, N, C, Q, M, P, or K), an amino acid other than G at position 594 (e.g., T, M, A, K, S, Q, V, I, R, N, P, L, H, or Y), and/or an amino acid other than W at position 595 (e.g., K, Q, S, P, C, A, G, N, T, R, V, M, H, L, E, F, or Y), relative to a reference sequence numbered according to the amino acid sequence of SEQ ID NO: 138.

[0014] In yet another embodiment, provided herein is an isolated, e.g., recombinant, AAV particle comprising an AAV capsid variant and a nucleic acid comprising a transgene encoding an antibody molecule which binds to tau (e.g., human tau), wherein the AAV capsid variant comprises PLNGAVHLY (SEQ ID NO: 3648) and optionally wherein the AAV capsid variant further comprises one, two, or all of an amino acid other than T at position 593 (e.g., A, L, R, V, C, I, K, M, N, P, Q, S), an amino acid other than G at position 594 (e.g., M, S, A, Q, V, T, L, P, H, K, N, I, Y, or R), and/or an amino acid other than W at position 595 (e.g., S, P, T, A, G, L, Q, H, N, R, K, V, E, F, M, C, or Y), relative to a reference sequence numbered according to the amino acid sequence of SEQ ID NO: 138.

[0015] In yet another embodiment, provided herein is an isolated, e.g., recombinant, AAV particle comprising an AAV capsid variant and a nucleic acid comprising a transgene encoding an antibody molecule which binds to tau (e.g., human tau), wherein the AAV capsid variant comprises an amino sequence comprising the amino acid sequence of PLNGAVHLY(SEQ ID NO: 3648); and which further comprises one, two, three, or all of: (i) the amino acid at position 593, relative to a reference sequence numbered according to the amino acid sequence of SEQ ID NO: 138, is: T, A, L, R, V, C, I, K, M, N, P, Q, or S; (ii) the amino acid at position 594, relative to a reference sequence numbered according to the amino acid sequence of SEQ ID NO: 138, is: G, M, S, A, Q, V, T, L, P, H, K, N, I, Y, or R; and/or (iii) the amino acid at position 595, relative to a reference sequence numbered according to the amino acid sequence of SEQ ID NO: 138, is: W, S, P, T, A, G, L, Q, H, N, R, K, V, E, F, M, C, or Y. In some embodiments, the amino acids at positions 593-595, relative to a reference sequence numbered according to the amino acid sequence of SEQ ID NO: 138, does not comprise the amino acid sequence of TGW.

[0016] In yet another aspect, provided herein is an isolated, e.g., recombinant, AAV particle comprising an AAV capsid variant and a nucleic acid comprising a transgene encoding an antibody molecule which binds to tau (e.g., human tau), wherein the AAV capsid variant comprises X1-X2-X3-X4-X5-X6-X7-X8-X9-X10-X11-X12-X13-X14-X15-X16-X17-X18-X19, wherein: (i) X1 is: P, A, D, E, F, G, H, K, L, N, Q, R, S, T, or V; (ii) X2 is: L, D, E, F, H, I, M, N, P, Q, R, S, or V; (iii) X3 is: N, A, D, E, G, H, I, K, Q, S, T, V, or Y; (iv) X4 is: G, A, C, D, E, P, Q, R, S, T, V, or W; (v) X5 is: A, C, D, E, F, G, H, I, K, N, P, Q, R, S, T, V, W, or Y; (vi) X6 is: V, A, C, D, E, F, G, H, I, K, L, M, N, Q, R, S, T, or Y; (vii) X7 is: H, A, D, E, G, I, K, L, M, N, P, Q, R, S, T, V, or Y; (viii) X8 is: L, A, D, E, F, G, H, I, K, M, N, P, Q, R, S, T, V, or Y; (ix) X9 is: Y, A, C, D, E, F, G, H, I, K, L, M, N, Q, R, S, T, V, or W; (x) X10 is: A, C, D, E, F, G, H, I, K, L, N, P, Q, R, S, T, V, or; Y; (xi) X11 is: Q, A, D, E, H, K, L, P, R, or T; (xii) X12 is: A, D, E, G, H, L, N, P, Q, R, S, T, or V; (xiii) X13 is: Q, E, H, K, L, P, R, or T; (xiv) X14 is: T, A, C, D, E, F, G, H, I, K, L, M, N, P, Q, R, S, V, W, or Y; (xv) X15 is: G, A, C, D, E, F, H, I, K, L, M, N, P, Q, R, S, T, V, W, or Y; (xvi) X16 is: W, A, C, D, E, F, G, H, I, K, L, M, N, P, Q, R, S, T, V, or Y; (xvii) X17 is: V, A, D, E, F, G, H, I, or L; (xviii) X18 is: Q, E, H, K, L, P, or R; and/or (xix) X19 is: N, D, H, I, K, P, S, T, or Y.

[0017] In yet another aspect, provided herein is an isolated, e.g., recombinant, AAV particle comprising an AAV capsid variant and a nucleic acid comprising a transgene encoding an antibody molecule which binds to tau (e.g., human tau), wherein the AAV capsid variant comprises: (a) the amino acid sequence of any one of SEQ ID NOs: 139-1138; (b) an amino acid sequence comprising at least 3, 4, 5, 6, 7, 8, 9, 10, 11, 12, 13, 14, 15, 16, 17, or 18 consecutive amino acids from any one of SEQ ID NOs: 139-1138; (c) an amino acid sequence comprising at least one, two, or three but no more than four different amino acids, relative to the amino acid sequence of any one of SEQ ID NOs: 139-1138; or (d) an amino sequence comprising at least one, two, or three but no more than four modifications, e.g., substitutions (e.g., conservative substitutions), insertions, or deletions, relative to the amino acid sequence of any one of SEQ ID NOs: 139-1138. In some embodiments, the AAV capsid variant does not comprise the amino acid sequence of TGW at positions 593-595, relative to a reference sequence numbered according to the amino acid sequence of SEQ ID NO: 138.

[0018] In some embodiments, the AAV capsid variant does not comprise: (i) the amino acid sequence of TLAVPFK (SEQ ID NO: 1262) present immediately subsequent to position 588, numbered according to SEQ ID NO: 138; (ii) an amino acid sequence present immediately subsequent to position 586 to 599, e.g., 586 to 594, 587 to 595, 588 to 596, 589 to 597, 590 to 598 numbered relative to SEQ ID NO: 138, having at least 5 consecutive amino acids corresponding to positions 586 to 594 numbered relative to SEQ ID NO: 138, of any the amino acid sequences provided in Table 1 of WO2020223276, the contents of which are hereby incorporated by reference in their entirety; or (iii) an amino acid sequence present immediately subsequent to position 586 to 599, e.g., 586 to 594, 587 to 595, 588 to 596, 589 to 597, 590 to 598 numbered relative to SEQ ID NO: 138, having at least 5 consecutive amino acids corresponding to positions 586 to 594 numbered relative to SEQ ID NO: 138, of any SEQ ID NOs: 1, 12, 13, or 138.

[0019] In some embodiments, the anti-tau antibody molecule binds to the N-terminal region, mid-domain region, C-terminal region, microtubule binding domain, or the proline-rich domain of a tau protein (e.g., a human tau protein comprising the amino acid sequence of SEQ ID NO: 9200). In some embodiments, the anti-tau antibody molecule binds to (a) all or a portion of (e.g., one or more residues within) amino acid residues (1) 9-18, (2) 15-25, (3) 25-30, and/or (4) 15-30, numbered according to SEQ ID NO: 9200; (b) all or a portion of (e.g., one or more residues within) amino acid residues (1) 125-131, (2) 204-222, (3) 234-246, (4) 234-259, and/or (5) 235-246, numbered according to SEQ ID NO: 9200; (c) an epitope which includes one or more of pT181, pS199, pS202, pT205, pT212, pS214, pT217, pT231, pS234, pS235, pS258, pS259, pS396, pS404, and/or pT217, numbered according to SEQ ID NO: 9200; (d) all or a portion of (one or more residues within) amino acid residues (1) 387-408 and/or (2) 409-436, numbered according to SEQ ID NO: 9200; (e) all or a portion of (e.g., one or more residues within) amino acid residues (1) 32-49, (2) 55-76, (3) 57-72, (4) 159-194, (5) 175-191, (6) 185-200, (7) 219-247, (8) 223-238, (9) 381-426, (10) 383-400, (11) 409-436, and/or (12) 413-430, numbered according to SEQ ID NO: 9200; (f) a conformational epitope which includes all or a portion of (e.g., one or more residues within) amino acid residues (1) 55-76, (2) 159-194, (3) 219-247, and/or (4) 381-426, numbered according to SEQ ID NO: 9200.

[0020] In some embodiments, the anti-tau antibody molecule comprises: (i) a heavy chain variable region comprising one, two, or three HCDR sequences of any one of the anti-tau antibody molecules described herein (e.g., an antibody molecule listed in Tables 7-16); and/or (ii) a light chain variable region comprising one, two, or three LCDR sequences of any one of the anti-tau antibody molecules described herein (e.g., an antibody molecule listed in Tables 7-16).

[0021] In some embodiments, the anti-tau antibody molecule comprises: (i) a heavy chain variable region (VH) comprising the amino acid sequence of the VH of any one of the anti-tau antibody molecules described herein (e.g., the VH sequence of an antibody molecule listed in Tables 7-16), or an amino acid sequence having at least 80% (e.g., 85, 90, 95, 96, 97, 98, or 99%) sequence identity to the VH sequence of any one of the anti-tau antibody molecules described herein (e.g., the VH sequence of an antibody molecule listed in Tables 7-16), or an amino acid sequence having at least one, two or three modifications, but not more than 30, 20 or 10 modifications, to the amino acid sequence of the VH of any of the anti-tau antibody molecules described herein (e.g., the VH sequence of an antibody molecule listed in Tables 7-16); and/or (ii) a light chain variable region (VL) comprising the amino acid sequence of the VL of any one of the anti-tau antibody molecules described herein (e.g., the VL sequence of an antibody molecule listed in Tables 7-16), or an amino acid sequence having at least 80% (e.g., 85, 90, 95, 96, 97, 98, or 99%) sequence identity to the VL sequence of any one of the anti-tau antibody molecules described herein (e.g., the VL sequence of an antibody molecule listed in Tables 7-16), or an amino acid sequence having at least one, two or three modifications, but not more than 30, 20 or 10 modifications, to the amino acid sequence of the VL of any of the anti-tau antibody molecules described herein (e.g., the VL sequence of an antibody molecule listed in Tables 7-16).

[0022] In some embodiments, the anti-tau antibody molecule comprises (a) the HCDR1, HCDR2, and/or HCDR3 sequences, and/or LCDR1, LCDR2, and/or LCDR3 sequences, (b) the VH and/or VL sequences, or (c) the heavy chain and/or light chain sequences of IPN002, AT8, PT3, UCB, PT76, PHF1, C10.2, V0004, V0009, V0022, V0023, V0024, and V0052 as described, e.g., in WO2020223276 and WO2021/211753. In some embodiments, the anti-tau antibody molecule has at most one, two, or three substitutions (e.g., conservative amino acid substitutions) in each CDR relative to the HCDR1-3 and LCDR1-3 sequences of IPN002, AT8, PT3, UCB, PT76, PHF1, C10.2, V0004, V0009, V0022, V0023, V0024, or V0052. In some embodiments, the anti-tau antibody molecule comprises a VH sequence having at least 80% (e.g., 85, 90, 95, 96, 97, 98, or 99%) sequence identity to the VH sequence of any one of IPN002, AT8, PT3, UCB, PT76, PHF1, C10.2, V0004, V0009, V0022, V0023, V0024, or V0052, and/or a VL sequence having at least 80% (e.g., 85, 90, 95, 96, 97, 98, or 99%) sequence identity to the VL sequence of any one of IPN002, AT8, PT3, UCB, PT76, PHF1, C10.2, V0004, V0009, V0022, V0023, V0024, or V0052. In some embodiments, the anti-tau antibody molecule comprises a VH sequence having at least one, two, or three modifications, but not more than 30, 20, or 10 modifications, relative to the VH sequence of any one of IPN002, AT8, PT3, UCB, PT76, PHF1, C10.2, V0004, V0009, V0022, V0023, V0024, and V0052, and/or a VL sequence having at least one, two, or three modifications, but not more than 30, 20, or 10 modifications, relative to the VL sequence of any one of IPN002, AT8, PT3, UCB, PT76, PHF1, C10.2, V0004, V0009, V0022, V0023, V0024, and V0052.

[0023] In some embodiments, the anti-tau antibodies have a heavy chain constant region and/or light chain constant region listed in Table 17, or a sequence having at least 80% (e.g., 85, 90, 95, 96, 97, 98, or 99%) sequence identity to the heavy chain and/or light chain constant region sequences in Table 17, or an amino acid sequence having at least one, two or three modifications, but not more than 30, 20 or 10 modifications, to the amino acid sequence of the heavy chain and/or light chain constant region sequences in Table 17.

[0024] In some embodiments, the anti-tau antibody molecule competes for binding to tau with an antibody described herein (e.g., an antibody molecule listed in Tables 7-16). In some embodiments, the anti-tau antibody molecule binds to the same epitope, substantially the same epitope as, an epitope that overlaps with, or an epitope that substantially overlaps with an antibody described herein (e.g., an antibody molecule listed in Tables 7-16).

[0025] In some embodiments, the anti-tau antibody molecule comprises one or more of (a) an Fc region or functional variant thereof, e.g., an Fc region with altered effector function (e.g., reduced affinity for Fc receptor, reduced ADCC, reduced CDC), (b) a signal sequence, (c) a linker (e.g., a linker listed in Table 19).

[0026] In some embodiments, the anti-tau antibody molecule is a multispecific antibody molecule comprising at least two antigen-binding domains (e.g., a bispecific antibody molecule).

[0027] In some embodiments, the AAV particle comprises a viral genome comprising one or more of the following: a promoter operably linked to the nucleic acid sequence encoding the antibody molecule, a poly A sequence, an inverted terminal repeat (ITR) sequence (positioned 5′ and/or 3′ relative to the encoded antibody molecule), an enhancer, a Kozak sequence (e.g., GCCGCCACCATG (SEQ ID NO: 9021) or GAGGAGCCACC (SEQ ID NO: 9022)), an intron region, and/or an exon region described herein. In some embodiments, the viral genome comprises a nucleotide sequence encoding a miR binding site described herein.

[0028] In some embodiments, the viral genome is single stranded or self-complementary. In some embodiments, the viral genome further comprises a nucleotide sequence encoding a Rep protein described herein.

[0029] Also provided herein are cells (e.g., a host cell) comprising an AAV particle described herein. In some embodiments, the cell is a mammalian cell (e.g., a cell of a brain region, such as a neuron, astrocyte, or glial cell) or an insect cell.

[0030] In yet another aspect, provided herein is a method of making an AAV particle described herein, comprising (a) providing a host cell comprising a viral genome; and (b) incubating the host cell under conditions suitable to enclose the viral genome in an AAV capsid variant, e.g., an AAV capsid variant described herein, thereby making the AAV particle.

[0031] In yet another aspect, provided herein is a pharmaceutical composition comprising an AAV particle described herein, and a carrier (e.g., a pharmaceutically acceptable excipient).

[0032] In yet another aspect, provided herein is a method of delivering a payload to a cell or tissue (e.g., CNS cell or CNS tissue) comprising administering an effective amount of a pharmaceutical composition described herein or an AAV particle described herein. In some embodiments, the cell or tissue is within a subject.

[0033] In yet another aspect, provided herein is a method of treating a subject having or diagnosed with having a neurological disorder (e.g., a neurodegenerative disorder), tau-related disease, or tauopathy, comprising administering to the subject an effective amount of the pharmaceutical composition described herein, or an AAV particle described herein. In some embodiments, the AAV particles, compositions, and methods may, for example, be used for treating a tau-related disorder (e.g., disease associated with expression of tau, neurological (e.g., neurodegenerative) disorders, and/or tauopathies), such as Alzheimer's disease (AD), frontotemporal dementia and parkinsonism linked to chromosome 17 (FTDP-17), frontotemporal lobar degeneration (FTLD), frontotemporal dementia (FTD), chronic traumatic encephalopathy (CTE), progressive Supranuclear Palsy (PSP), Down's syndrome, Pick's disease, corticobasal degeneration (CBD), corticobasal syndrome, amyotrophic lateral sclerosis (ALS), prion diseases, Creutzfeldt-Jakob disease (CJD), multiple system atrophy, tangle-only dementia, and progressive subcortical gliosis.

[0034] In some embodiments, the AAV particle is administered to the subject intravenously, via intra-cisterna magna injection (ICM), intracerebrally, intrathecally, intracerebroventricularly, via intraparenchymal administration, or intramuscularly, or via focused ultrasound (FUS), e.g., coupled with the intravenous administration of microbubbles (FUS-MB), or MRI-guided FUS coupled with intravenous administration.

[0035] In some embodiments, administration of the AAV particle or pharmaceutical composition described herein results in a decreased presence, level, and/or activity of a tau mRNA, tau protein, or combination thereof. In other embodiments, administration of the AAV particle or pharmaceutical composition described herein results in a increased presence, level, and/or activity of a tau mRNA, tau protein, or combination thereof.

[0036] Those skilled in the art will recognize or be able to ascertain using no more than routine experimentation, many equivalents to the specific embodiments of the invention described herein. Such equivalents are intended to be encompassed by the following enumerated embodiments.

### Enumerated Embodiments

[0037] 1. An isolated, e.g., recombinant, AAV particle comprising an AAV capsid variant and a nucleic acid comprising a transgene encoding an antibody molecule which binds to tau (e.g., human tau), wherein the AAV capsid variant:
   [0038] (i) is enriched at least about 5, 6, 7, 8, 9, 10, 20, 30, 40, 50, 100, 200, 300, or 400-fold, in the brain, e.g., the brain of a non-human primate (NHP) compared to a reference sequence of SEQ ID NO: 138 (e.g., as provided in Table 1), e.g., when measured by an assay as described in Example 1;
   [0039] (ii) transduces a brain region, e.g., a brain region of an NHP, e.g., selected from dentate nucleus, cerebellar cortex, cerebral cortex, brain stem, hippocampus, thalamus and putamen, wherein the level of transduction is at least 5, 10, 50, 100, 200, 500, 1,000, 2,000, 5,000, or 10,000-fold greater as compared to a reference sequence of SEQ ID NO: 138, e.g., when measured by an assay, e.g., an immunohistochemistry assay, a qRT-PCR, or a RT-ddPCR assay, e.g., as described in Example 2;
   [0040] (iii) delivers an increased level of a payload to a brain region, e.g., a brain region of an NHP, optionally wherein the level of the payload is increased by at least 500, 1,000, 2,000, 5,000, or 10,000-fold, as compared to a reference sequence of SEQ ID NO: 138, e.g., when measured by an assay, e.g., a qRT-PCR or a RT-ddPCR assay (e.g., as described in Example 2), optionally wherein the brain region comprises a frontal cortex, sensory cortex, motor cortex, putamen, thalamus, cerebellar cortex, dentate nucleus, caudate, and/or hippocampus;
   [0041] (iv) delivers an increased level of a payload to a spinal cord region, e.g., a spinal cord region of an NHP, optionally wherein the level of the payload is increased by at least 10, 20, 50, 100, 200, 300, 400, 500, 600, 700, 800 or 900-fold, as compared to a reference sequence of SEQ ID NO: 138, e.g., when measured by an assay, e.g., a qRT-PCR assay (e.g., as described in Example 2), optionally wherein the spinal cord region comprises a cervical, thoracic, and/or lumbar region; and/or
   [0042] (v) delivers an increased level of viral genomes to a brain region, e.g., a brain region of an NHP, optionally wherein the level of viral genomes is increased by at least 5, 10, 20, 30, 40 or 50-fold, as compared to a reference sequence of SEQ ID NO: 138, e.g., when measured by an assay, e.g., a qRT-PCR or a RT-ddPCR assay (e.g., as described in Example 2), optionally wherein the brain region comprises a frontal cortex, sensory cortex, motor cortex, putamen, thalamus, cerebellar cortex, dentate nucleus, caudate, and/or hippocampus.
[0043] 2. An isolated, e.g., recombinant, AAV particle comprising an AAV capsid variant and a nucleic acid comprising a transgene encoding an antibody molecule which binds to tau, wherein the AAV capsid variant comprises:
   [0044] (a) the amino acid sequence of any of SEQ ID NO: 3648-3659 or a sequence provided in Table 20;
   [0045] (b) an amino acid sequence comprising at least 5, 6, 7, 8, or 9 consecutive amino acids from the amino acid sequence of any of SEQ ID NO: 3648-3659 or a sequence provided in Table 20;
   [0046] (c) an amino acid sequence comprising at least one, two, or three but no more than four modifications, e.g., substitutions, (e.g., conservative substitutions), insertions, or deletions, relative to the amino acid sequence of any of 3648-3659 or a sequence provided in Table 20; or
   [0047] (d) an amino acid sequence comprising at least one, two, or three but no more than four different amino acids relative to the amino acid sequence of any of 3648-3659 or a sequence provided in Table 20;
   [0048] optionally wherein the capsid variant comprises the amino acid sequence of SEQ ID NO: 138, or an amino acid sequence with at least 95% sequence identity thereto.
[0049] 3. The isolated AAV particle of any one of embodiments 1 or 2, wherein the AAV capsid variant comprises:
   [0050] (a) the amino acid sequence of PLNGAVHLY (SEQ ID NO: 3648), or at least 5, 6, 7, or 8 consecutive amino acids from the amino acid sequence of PLNGAVHLY (SEQ ID NO: 3648);
   [0051] (b) the amino acid sequence of IVMNSLK (SEQ ID NO: 3651), or at least 4, 5, or 6 consecutive amino acids from the amino acid sequence of IVMNSLK (SEQ ID NO: 3651); or
   [0052] (c) the amino acid sequence of YSTDVRM (SEQ ID NO: 3650), YSTDERM (SEQ ID NO: 3657), or YSTDERK (SEQ ID NO: 3658), or at least 4, 5, or 6 consecutive amino acids from the amino acid sequence of YSTDVRM (SEQ ID NO: 3650), YSTDERM (SEQ ID NO: 3657), or YSTDERK (SEQ ID NO: 3658).
[0053] 4. The isolated AAV particle of embodiment 2 or 3, wherein:
   [0054] (i) the 5 consecutive amino acids comprise PLNGA (SEQ ID NO: 3679);
   [0055] (ii) the 6 consecutive amino acids comprise PLNGAV (SEQ ID NO: 3680);
   [0056] (iii) the 7 consecutive amino acids comprise PLNGAVH (SEQ ID NO: 3681);
   [0057] (iv) the 8 consecutive amino acids comprise PLNGAVHL (SEQ ID NO: 3682); and/or
   [0058] (v) the 9 consecutive amino acids comprise PLNGAVHLY (SEQ ID NO: 3648);
   [0059] optionally wherein the amino acid sequence of (i), (ii), (iii), (iv), or (v) is present immediately subsequent to position 586, relative to a reference sequence numbered according to the amino acid sequence of SEQ ID NO: 138.
[0060] 5. The isolated AAV particle of any one of embodiments 2-4, wherein:
   [0061] (i) the 5 consecutive amino acids comprise IVMNS (SEQ ID NO: 3694);
   [0062] (ii) the 6 consecutive amino acids comprise IVMNSL (SEQ ID NO: 3695); and/or
   [0063] (iii) the 7 consecutive amino acids comprise IVMNSLK (SEQ ID NO: 3651), optionally wherein the amino acid sequence of (i), (ii), or (iii) is present immediately subsequent to position 588, relative to a reference sequence numbered according to the amino acid sequence of SEQ ID NO: 138.
[0064] 6. The isolated AAV particle of any one of embodiments 1-5, wherein the AAV capsid variant comprises:
   [0065] (i) the amino acid sequence of PLNGAVHLY (SEQ ID NO: 3648), wherein the amino acid sequence of PLNGAVHLY (SEQ ID NO: 3648) is present immediately subsequent to position 586, relative to a reference sequence numbered according to the amino acid sequence of SEQ ID NO: 138;
   [0066] (ii) the amino acid sequence of GGTLAVVSL (SEQ ID NO: 3654), wherein the amino acid sequence of GGTLAVVSL (SEQ ID NO: 3654) is present immediately subsequent to position 586, relative to a reference sequence numbered according to the amino acid sequence of SEQ ID NO: 138;
   [0067] (iii) the amino acid sequence of IVMNSLK (SEQ ID NO: 3651), wherein the amino acid sequence of IVMNSLK (SEQ ID NO: 3651) is present immediately subsequent to position 588, relative to a reference sequence numbered according to the amino acid sequence of SEQ ID NO: 138; or
   [0068] (iv) the amino acid sequence of any of SEQ ID NOs: 3649, 3650, 3652, 3653, or 3655-3659, wherein the amino acid sequence of any of the aforesaid sequences is present immediately subsequent to position 589, relative to a reference sequence numbered according to the amino acid sequence of SEQ ID NO: 138.
[0069] 7. The isolated AAV particle of any one of embodiments 1-6, wherein:
   [0070] (i) the AAV capsid variant comprises an amino acid sequence encoded by the nucleotide sequence of any one of SEQ ID NOs: 3660-3671, or a nucleotide sequence having at least 80%, 85%, 90%, 92%, 95%, 96%, 97%, 98%, or 99% sequence identity thereto;
   [0071] (ii) the AAV capsid variant comprises an amino acid sequence encoded by a nucleotide sequence comprising at least one, two, three, four, five, six, or seven modifications, e.g., substitutions (e.g., conservative substitutions), but no more than ten modifications of the nucleotide sequences of any of SEQ ID NOs: 3660-3671;
   [0072] (iii) the AAV capsid variant comprises an amino acid sequence encoded by a nucleotide sequence comprising at least one, two, three, four, five, six, or seven but no more than ten different nucleotides relative to the nucleotide sequences of any of SEQ ID NOs: 3660-3671;
   [0073] (iv) the nucleotide sequence encoding the AAV capsid variant comprises the nucleotide sequence of any one of SEQ ID NOs: 3660-3671, or a nucleotide sequence having at least 80%, 85%, 90%, 92%, 95%, 96%, 97%, 98%, or 99% sequence identity thereto; and/or
   [0074] (v) the nucleotide sequence encoding the AAV capsid variant comprises a nucleotide sequence comprising at least one, two, three, four, five, six, or seven modifications, e.g., substitutions (e.g., conservative substitutions), but no more than ten modifications of the nucleotide sequence of any of SEQ ID NOs: 3660-3671.
[0075] 8. The isolated AAV particle of any one of embodiments 1-5, wherein the AAV capsid variant comprises:
   [0076] (i) the AAV capsid variant comprises the amino acid sequence of any one of SEQ ID NOs: 3636-3647, or an amino acid sequence with at least 90% (e.g., at least 95, 96, 97, 98, or 99%) sequence identity thereto; or
   [0077] (ii) the nucleotide sequence encoding the AAV capsid variant comprises the nucleotide sequence of any one of SEQ ID NOs: 3623-3635, or a nucleotide sequence with at least 90% (e.g., at least 95, 96, 97, 98, or 99%) sequence identity thereto.
[0078] 9. An isolated, e.g., recombinant, AAV particle comprising an AAV capsid variant and a nucleic acid comprising a transgene encoding an antibody molecule which binds to tau (e.g., human tau), wherein the AAV capsid variant comprises:
   [0079] (i) the amino acid sequence of PLNGAVHLY (SEQ ID NO: 3648);
   [0080] (ii) an amino acid sequence comprising at least 5, 6, 7, 8, or 9 consecutive amino acids from the amino acid sequence of PLNGAVHLY (SEQ ID NO: 3648);
   [0081] (iii) an amino acid sequence comprising at least one, two, or three but no more than four modifications, e.g., substitutions (e.g., conservative substitutions), insertions, or deletions, relative to the amino acid sequence of PLNGAVHLY (SEQ ID NO: 3648); or
   [0082] (iv) an amino acid sequence comprising at least one, two, or three but no more than four different amino acids relative to the amino acid sequence of PLNGAVHLY (SEQ ID NO: 3648);
   [0083] optionally wherein the capsid variant comprises the amino acid sequence of SEQ ID NO: 138, or an amino acid sequence with at least 95% sequence identity thereto.
[0084] 10. The isolated AAV particle of embodiment 9, wherein the amino acid sequence of (i), (ii), or (iii) is present in loop VIII, relative to a reference sequence of SEQ ID NO: 138.
[0085] 11. The isolated AAV particle of any one of embodiments 9 or 10, wherein the amino acid sequence is present immediately subsequent to position 586, relative to a reference sequence numbered according to the amino acid sequence of SEQ ID NO: 138.
[0086] 12. The isolated AAV particle of any one of embodiments 1-11, wherein the AAV capsid variant:
   [0087] (i) is enriched at least about 300 or 400-fold compared, in the brain compared to a reference sequence of SEQ ID NO: 138, e.g., when measured by an assay as described in Example 1;
   [0088] (ii) transduces a brain region, e.g., selected from dentate nucleus, cerebellar cortex, cerebral cortex, brain stem, hippocampus, thalamus and putamen, wherein the level of transduction is at least 500, 1,000, 2,000, 5,000, or 10,000-fold greater as compared to a reference sequence of SEQ ID NO: 138, e.g., when measured by an assay, e.g., an immunohistochemistry assay, a qRT-PCR, or a RT-ddPCR assay, e.g., as described in Example 2;
   [0089] (iii) delivers an increased level of a payload to a brain region, optionally wherein the level of the payload is increased by at least 500, 1,000, 2,000, 5,000, or 10,000-fold, as compared to a reference sequence of SEQ ID NO: 138, e.g., when measured by an assay, e.g., a qRT-PCR or a RT-ddPCR assay (e.g., as described in Example 2), optionally wherein the brain region comprises a frontal cortex, sensory cortex, motor cortex, putamen, thalamus, cerebellar cortex, dentate nucleus, caudate, and/or hippocampus;
   [0090] (iv) delivers an increased level of a payload to a spinal cord region, optionally wherein the level of the payload is increased by at least 50, 100, 200, 300, 400, 500, 600, 700, 800 or 900-fold, as compared to a reference sequence of SEQ ID NO: 138, e.g., when measured by an assay, e.g., a qRT-PCR assay (e.g., as described in Example 2), optionally wherein the spinal cord region comprises a cervical, thoracic, and/or lumbar region; and/or
   [0091] (v) delivers an increased level of viral genomes to a brain region, optionally wherein the level of viral genomes is increased by at least 5, 10, 20, 30, 40 or 50-fold, as compared to a reference sequence of SEQ ID NO: 138, e.g., when measured by an assay, e.g., a qRT-PCR or a RT-ddPCR assay (e.g., as described in Example 2), optionally wherein the brain region comprises a frontal cortex, sensory cortex, motor cortex, putamen, thalamus, cerebellar cortex, dentate nucleus, caudate, and/or hippocampus.
[0092] 13. The isolated AAV particle of any one of embodiments 1-8 or 10, wherein:
   [0093] (i) the AAV capsid variant has an increased tropism for a muscle cell or tissue, e.g., a heart tissue, relative to the tropism of a reference sequence comprising the amino acid sequence of SEQ ID NO: 138; and/or
   [0094] (ii) the AAV capsid variant delivers an increased level of a payload to a muscle region, optionally wherein the level of the payload is increased by at least 10, 15, 20, 30, or 40-fold, as compared to a reference sequence of SEQ ID NO: 138, e.g., when measured by an assay, e.g., an IHC assay or a RT-ddPCR assay (e.g., as described in Example 2), optionally wherein the muscle region comprises a heart muscle (e.g., a heart atrium muscle region or a heart ventricle muscle region), quadriceps muscle, and/or a diaphragm muscle region.
[0095] 14. The isolated AAV particle of any one of embodiments 1-13, wherein the AAV capsid variant comprises:
   [0096] (i) a VP1 protein, a VP2 protein, a VP3 protein, or a combination thereof;
   [0097] (ii) the amino acid sequence corresponding to positions 138-743, e.g., a VP2, of any one of SEQ ID NOs: 3636-3647, or a sequence with at least 90% (e.g., at least about 95, 96, 97, 98, or 99%) sequence identity thereto;
   [0098] (iii) the amino acid sequence corresponding to positions 203-743, e.g., a VP3, of any one of SEQ ID NOs: 3636-3647, or a sequence with at least 90% (e.g., at least about 95, 96, 97, 98, or 99%) sequence identity thereto;
   [0099] (iv) the amino acid sequence of any one of SEQ ID NOs: 3636-3647, or an amino acid sequence with at least 90% (e.g., at least about 95, 96, 97, 98, or 99%) sequence identity thereto;
   [0100] (v) an amino acid sequence having at least one, two or three modifications, but not more than 30, 20 or 10 modifications, e.g., substitutions (e.g., conservative substitutions), of the amino acid sequence of any one of SEQ ID NOs: 3636-3647;
   [0101] (vi) an amino acid sequence having at least one, two or three, but no more than 30, 20 or 10 different amino acids relative to the amino acid sequence of any one of SEQ ID NOs: 3636-3647; and/or
   [0102] (vii) an amino acid sequence encoded by the nucleotide sequence of any one of SEQ ID NOs: 3623-3635, or a nucleotide sequence with at least 90% (e.g., at least about 95, 96, 97, 98, or 99%) sequence identity thereto.
[0103] 15. An isolated, e.g., recombinant, AAV particle comprising an AAV capsid variant and a nucleic acid comprising a transgene encoding an antibody molecule which binds to tau (e.g., human tau), wherein the AAV capsid variant comprises an amino sequence comprising the following formula: [N1]−[N2], wherein:
   [0104] (i) [N1] comprises X1, X2, X3, X4, and X5, wherein:
      [0105] (a) position X1 is: P, Q, A, H, K, L, R, S, or T;
      [0106] (b) position X2 is: L, I, V, H, or R;
      [0107] (c) position X3 is: N, D, I, K, or Y;
      [0108] (d) position X4 is: G, A, C, R, or S; and
      [0109] (e) position X5 is: A, S, T, G, C, D, N, Q, V, or Y; and
   [0110] (ii) [N2] comprises the amino acid sequence of VHLY (SEQ ID NO: 4680), VHIY (SEQ ID NO: 4681), VHVY (SEQ ID NO: 4682), or VHHY (SEQ ID NO: 4683); and/or
   [0111] an amino acid modification, e.g., a conservative substitution, of any of the aforesaid amino acids in (i) and/or (ii);
   [0112] optionally wherein the AAV capsid variant further comprises:
   [0113] (i) one, two, or all of an amino acid other than T at position 593 (e.g., V, L, R, S, A, C, I, K, M, N, P, or Q), an amino acid other than G at position 594 (e.g., S, A, T, M, V, Q, L, H, I, K, N, P, R, or Y), and/or an amino acid other than W at position 595 (e.g., S, P, G, A, Q, L, M, K, C, E, F, H, R, T, V, or Y), relative to a reference sequence numbered according to the amino acid sequence of SEQ ID NO: 138; and/or
   [0114] (ii) one, two, or all of an amino acid other than V at position 596 (e.g., D, F, G, L, A, E, or I), an amino acid other than Q at position 597 (e.g., P, K, R, H, E, or L), and/or an amino acid other than N at position 598 (e.g., T, K, H, D, Y, S, I, or P), relative to a reference sequence numbered according to the amino acid sequence of SEQ ID NO: 138.
[0115] 16. An isolated, e.g., recombinant, AAV particle comprising an AAV capsid variant and a nucleic acid comprising a transgene encoding an antibody molecule which binds to tau (e.g., human tau), wherein the AAV capsid variant comprises one, two, three, four, or all of:
   [0116] (i) an [N1], wherein [N1] is or comprises: PLNGA (SEQ ID NO: 3679), SLNGA (SEQ ID NO: 4684), QLNGA (SEQ ID NO: 4685), ALNGA (SEQ ID NO: 4686), PLNGS (SEQ ID NO: 4687), PVNGA (SEQ ID NO: 4688), PLNGG (SEQ ID NO: 4689), PLNGT (SEQ ID NO: 4690), PLDGA (SEQ ID NO: 4691), QLNGS (SEQ ID NO: 4692), PLNGN (SEQ ID NO: 4693), SLDGA (SEQ ID NO: 4694), HLNGA (SEQ ID NO: 4695), ALNGT (SEQ ID NO: 4696), PINGA (SEQ ID NO: 4697), ALDGA (SEQ ID NO: 4698), PLNCA (SEQ ID NO: 4699), PLNGQ (SEQ ID NO: 4700), PLDSA (SEQ ID NO: 4701), RLDGA (SEQ ID NO: 4702), QLNGN (SEQ ID NO: 4703), PLNGY (SEQ ID NO: 4704), PLDSS (SEQ ID NO: 4705), PLNGC (SEQ ID NO: 4706), PLYGA (SEQ ID NO: 4707), TLNGA (SEQ ID NO: 4708), PVDGA (SEQ ID NO: 4709), PLKGA (SEQ ID NO: 4710), PLNGD (SEQ ID NO: 4711), KLDGA (SEQ ID NO: 4712), PHNGA (SEQ ID NO: 4713), PLNGV (SEQ ID NO: 4714), PLNAA (SEQ ID NO: 4715), QLNGY (SEQ ID NO: 4716), PLDGS (SEQ ID NO: 4717), LLNGA (SEQ ID NO: 4718), PLNRA (SEQ ID NO: 4719), PLIGA (SEQ ID NO: 4720), PRNGA (SEQ ID NO: 4721), or ALNGS (SEQ ID NO: 4722);
   [0117] (ii) an [N2] wherein [N2] is or comprises: VHLY (SEQ ID NO: 4680), VHVY (SEQ ID NO: 4682), VPLY (SEQ ID NO: 4723), VNLY (SEQ ID NO: 4724), VHRY (SEQ ID NO: 4725), VHIY (SEQ ID NO: 4681), VHHY (SEQ ID NO: 4683), FHLY (SEQ ID NO: 4726), LHLY (SEQ ID NO: 4727), DHLY (SEQ ID NO: 4728), VQLY (SEQ ID NO: 4729), IHLY (SEQ ID NO: 4730), VDLY (SEQ ID NO: 4731), AHLY (SEQ ID NO: 4732), VLLY (SEQ ID NO: 4733), GHLY (SEQ ID NO: 4734), VRLY (SEQ ID NO: 4735), or VYLY (SEQ ID NO: 4736);
   [0118] (iii) an [N3] wherein [N3] is or comprises: AQAQ (SEQ ID NO: 4737), SQAQ (SEQ ID NO: 4738), AQPQ (SEQ ID NO: 4739), AQSQ (SEQ ID NO: 4740), AKAQ (SEQ ID NO: 4741), AHAQ (SEQ ID NO: 4742), AQAP (SEQ ID NO: 4743), DQAQ (SEQ ID NO: 4744), APAQ (SEQ ID NO: 4745), AQAK (SEQ ID NO: 4746), AQAH (SEQ ID NO: 4747), AQEQ (SEQ ID NO: 4748), ALAQ (SEQ ID NO: 4749), ARAQ (SEQ ID NO: 4750), or TQAQ (SEQ ID NO: 4751);
   [0119] (iv) an [N4] wherein [N4] is or comprises: TGW, TGL, TGS, TGG, TAW, TGR, TAS, LSS, TSS, SSL, SSS, TLS, TVS, VSS, TSP, VSP, TMS, LSP, VAS, TAL, TTS, TLP, VLP, RGW, LSG, LAS, SSP, LLP, STS, TSA, TTP, SAL, LGS, VTP, VSA, IGW, TGF, LTP, TLA, LSA, TVG, TAP, TMP, TSL, VQS, SSM, SLP, VSQ, RSS, TST, VMS, TTA, TQP, LST, LAP, TVA, RLS, TGY, TSG, TAG, VMP, TSQ, TMA, VGS, TSW, TGV, TGT, TLG, LMP, VQP, TGM, SMS, SQL, IGS, RSV, TAA, STP, LSQ, TAQ, TGP, ASP, VSG, SAP, TLQ, LQP, TAT, TGQ, ATS, IGG, VAA, TSM, TVW, TAM, TGA, VAT, QSP, TQA, VQA, RSP, LAT, VAQ, LAA, RST, RTL, LGT, LMS, LGP, RTS, SQP, VLG, SVS, TMQ, SAV, LAG, SGP, TNS, RLT, TTQ, SAA, TSV, RLG, RAS, STQ, CSP, SAG, ALP, VTS, ISP, SVG, LTS, TTT, RSG, TQL, LNP, TVQ, IAS, LAQ, LSR, LSN, TTG, TSN, SMA, TKS, SVA, TQQ, VQQ, RLP, SAM, TAV, TQW, SSR, TQT, VNS, RSA, LMG, RQS, LVG, VTA, RTT, SMG, VMA, TKP, SAQ, NSP, ATP, VAG, RGS, VKP, RMS, NLP, NAL, RTP, RQL, VQG, VTG, VST, NAS, RVE, ATG, AMS, RNS, VMQ, SMQ, LQQ, TMG, LGQ, TSH, AAP, RSQ, TYS, ITP, VAK, TQM, TKA, SQQ, ISG, VSR, RTA, RML, SQM, VAN, CTP, ISS, AGP, TAK, RTG, LHP, TMT, AQP, QAP, RQP, LKS, NTT, TSK, RYS, KSS, NTP, VGG, IAA, LMA, MAP, VHP, VLS, LAN, ATQ, TNA, TAN, VSN, AAA, AVG, LTA, SAN, RAG, RQG, TLR, LSH, SAF, RAA, IQP, ILG, VNG, SVQ, LSK, TNG, RTQ, TMN, RGG, TTR, VRP, VKA, LAR, NQP, TMK, TYA, TQK, TTK, IAG, TQN, LAH, NTQ, RQQ, RAQ, TKQ, TQH, TNQ, LMQ, VNA, VQT, TQR, VGK, VKQ, IQS, LQR, TMM, VGN, RIG, SAK, RIA, VQN, NVQ, RIP, NAQ, NMQ, TPS, LTN, VTK, PGW, LPP, SPP, TPA, TGC, VPP, TPT, TPW, TPP, RPP, TPQ, TPR, TPG, VPA, VPQ, RPG, KGW, TRW, TAR, IPP, RSL, LVP, KGS, VAP, KGG, KAW, PGS, TRL, or AGW; and/or
   [0120] (v) an [N5] wherein [N5] is or comprises: VQN, VKN, VQT, VQK, DQN, VQH, GQN, VQI, VHN, FQN, LQN, VLN, VRN, VQS, VQY, AQN, VEN, VQD, VPN, IQN, VKK, DKN, VKT, VQP, EQN, GQT, FQK, GHN, or VPH; and/or
   [0121] wherein the AAV capsid variant comprises an amino acid modification, e.g., a conservative substitution, of any of the aforesaid amino acids in (i)-(v).
[0122] 17. The isolated AAV particle of embodiment 15, wherein:
   [0123] (a) position X1 is: P, Q, A, S, or T;
   [0124] (b) position X2 is L or I;
   [0125] (c) position X3 is N or D;
   [0126] (d) position X4 is G or S; and/or
   [0127] (e) position X5 is: A, S, G, T, or N.
[0128] 18. The isolated AAV particle of embodiment 15 or 17, wherein [N1] comprises AL, PI, PL, QL, SL, TL, LN, LD, IN, NG, DG, DS, GA, SA, SS, GG, GN, GS, or GT.
[0129] 19. The isolated AAV particle of any one of embodiments 15, 17, or 18, wherein [N1] comprises ALD, ALN, PIN, PLD, PLN, QLN, SLD, SLN, TLN, LNG, LDG, ING, LDS, NGA, DGA, DSA, DSS, NGG, NGN, NGS, NGT.
[0130] 20. The isolated AAV particle of any one of embodiments 15 or 17-19, wherein [N1] comprises ALDG (SEQ ID NO: 4762), ALNG (SEQ ID NO: 4758), PING (SEQ ID NO: 4763), PLDG (SEQ ID NO: 4764), PLDS (SEQ ID NO: 4765), PLNG (SEQ ID NO: 3678), QLNG (SEQ ID NO: 4766), SLDG (SEQ ID NO: 4767), SLNG (SEQ ID NO: 4756), or TLNG (SEQ ID NO: 4754).
[0131] 21. The isolated AAV particle of any one of embodiments 15-20, wherein [N1] is or comprises PLNGA (SEQ ID NO: 3679), SLNGA (SEQ ID NO: 4684), QLNGA (SEQ ID NO: 4685), ALNGA (SEQ ID NO: 4686), PLNGS (SEQ ID NO: 4687), PVNGA (SEQ ID NO: 4688), PLNGG (SEQ ID NO: 4689), PLNGT (SEQ ID NO: 4690), PLDGA (SEQ ID NO: 4691), QLNGS (SEQ ID NO: 4692), PLNGN (SEQ ID NO: 4693), SLDGA (SEQ ID NO: 4694), HLNGA (SEQ ID NO: 4695), ALNGT (SEQ ID NO: 4696), PINGA (SEQ ID NO: 4697), ALDGA (SEQ ID NO: 4698), PLNCA (SEQ ID NO: 4699), PLNGQ (SEQ ID NO: 4700), PLDSA (SEQ ID NO: 4701), RLDGA (SEQ ID NO: 4702), QLNGN (SEQ ID NO: 4703), PLNGY (SEQ ID NO: 4704), PLDSS (SEQ ID NO: 4705), PLNGC (SEQ ID NO: 4706), PLYGA (SEQ ID NO: 4707), TLNGA (SEQ ID NO: 4708), PVDGA (SEQ ID NO: 4709), PLKGA (SEQ ID NO: 4710), PLNGD (SEQ ID NO: 4711), KLDGA (SEQ ID NO: 4712), PHNGA (SEQ ID NO: 4713), PLNGV (SEQ ID NO: 4714), PLNAA (SEQ ID NO: 4715), QLNGY (SEQ ID NO: 4716), PLDGS (SEQ ID NO: 4717), LLNGA (SEQ ID NO: 4718), PLNRA (SEQ ID NO: 4719), PLIGA (SEQ ID NO: 4720), PRNGA (SEQ ID NO: 4721), or ALNGS (SEQ ID NO: 4722).
[0132] 22. The isolated AAV particle of embodiment 15-21, wherein [N1] is or comprises PLNGA (SEQ ID NO: 3679), ALDGA (SEQ ID NO: 4698), ALNGA (SEQ ID NO: 4686), PINGA (SEQ ID NO: 4697), PLDGA (SEQ ID NO: 4691), PLDSA (SEQ ID NO: 4701), PLDSS (SEQ ID NO: 4705), PLNGG (SEQ ID NO: 4689), PLNGN (SEQ ID NO: 4693), PLNGS (SEQ ID NO: 4687), PLNGT (SEQ ID NO: 4690), QLNGA (SEQ ID NO: 4685), SLDGA (SEQ ID NO: 4694), SLNGA (SEQ ID NO: 4684), or TLNGA (SEQ ID NO: 4708).
[0133] 23. The isolated AAV particle of embodiment 15-22, wherein [N1] is or comprises PLNGA (SEQ ID NO: 3679).
[0134] 24. The isolated AAV particle of any one of embodiments 15 or 17-18, or 20-23, wherein [N1]-[N2] comprises:

(i)
(SEQ ID NO: 4768)
LDGAVHLY,
(SEQ ID NO: 4769)
LNGAVHLY,
(SEQ ID NO: 4770)
INGAVHLY,
(SEQ ID NO: 4771)
LDSAVHLY,
(SEQ ID NO: 4772)
LDSSVHLY,
(SEQ ID NO: 4773)
LNGGVHLY,
(SEQ ID NO: 4774)
LNGNVHLY,
(SEQ ID NO: 4775)
LNGSVHLY,
(SEQ ID NO: 4776)
LNGTVHLY,
(SEQ ID NO: 4777)
LNGAVHIY,
(SEQ ID NO: 4778)
LDGAVHVY,
or
(SEQ ID NO: 4779)
LNGAVHHY;

[0135] (ii) an amino acid sequence comprising any portion of an amino acid sequence in (i), e.g., any 2, 4, 5, 6, or 7 amino acids, e.g., consecutive amino acids, thereof;
[0136] (iii) an amino acid sequence comprising at least one, two, or three but no more than four modifications, e.g., substitutions (e.g., conservative substitutions), insertions, or deletions, relative to any of the amino acid sequences in (i); or
[0137] (iv) an amino acid sequence comprising at least one, two, or three but no more than four different amino acids, relative to any one of the amino acid sequences in (i).
[0138] 25. The isolated AAV particle of any one of embodiments 15-24, wherein [N1]-[N2] is or comprises:

(i)
(SEQ ID NO: 3648)
PLNGAVHLY,
(SEQ ID NO: 4780)
ALDGAVHLY,
(SEQ ID NO: 4781)
ALNGAVHLY,
(SEQ ID NO: 4782)
PINGAVHLY,
(SEQ ID NO: 4783)
PLDGAVHLY,
(SEQ ID NO: 4784)
PLDSAVHLY,
(SEQ ID NO: 4785)
PLDSSVHLY,
(SEQ ID NO: 4786)
PLNGGVHLY,
(SEQ ID NO: 4787)
PLNGNVHLY,
(SEQ ID NO: 4788)
PLNGSVHLY,
(SEQ ID NO: 4789)
PLNGTVHLY,
(SEQ ID NO: 4790)
QLNGAVHLY,
(SEQ ID NO: 4791)
SLDGAVHLY,
(SEQ ID NO: 4792)
SLNGAVHLY,
(SEQ ID NO: 4793)
TLNGAVHLY,
(SEQ ID NO: 4794)
PLNGAVHIY,
(SEQ ID NO: 4795)
PLDGAVHVY,
or
(SEQ ID NO: 4796)
PLNGAVHHY;

[0139] (ii) an amino acid sequence comprising any portion of an amino acid sequence in (i), e.g., any 2, 3, 4, 5, 6, 7, or 8 amino acids, e.g., consecutive amino acids, thereof;
[0140] (iii) an amino acid sequence comprising at least one, two, or three but no more than four modifications, e.g., substitutions (e.g., conservative substitutions), insertions, or deletions, relative to any of the amino acid sequences in (i); or
[0141] (iv) an amino acid sequence comprising at least one, two, or three but no more than four different amino acids, relative to any one of the amino acid sequences in (i).
[0142] 26. The isolated AAV particle of any one of embodiments 15-25, wherein [N1]-[N2] is or comprises PLNGAVHLY (SEQ ID NO: 3648).
[0143] 27. The isolated AAV particle of any one of embodiments 15-26, wherein the AAV capsid variant further comprises one, two, three, or all of an amino acid other than A at position 589 (e.g., D, S, or T), an amino acid other than Q at position 590 (e.g., K, H, L, P, or R), an amino acid other than A at position 591 (e.g., P, E, or R), and/or an amino acid other than Q at position 592 (e.g., H, K, or P).
[0144] 28. The isolated AAV particle of any one of embodiments 15-27, wherein the AAV capsid variant further comprises one, two, three, or all of an amino acid other than A at position 596 (e.g., D, S, or T), an amino acid other than Q at position 597 (e.g., K, H, L, P, or R), an amino acid other than A at position 598 (e.g., P, E, or R), and/or an amino acid other than Q at position 599 (e.g., H, K, or P), numbered according to the amino acid sequence of SEQ ID NO: 5, 8, or 3636.
[0145] 29. The isolated AAV particle of any one of embodiments 15-28, wherein the AAV capsid variant further comprises
   [0146] (i) A at position 589, Q at position 590, A at position 591, and/or Q at position 592, numbered according to the amino acid sequence of SEQ ID NO: 138; or
   [0147] (ii) A at position 596, Q at position 597, A at position 598, and/or Q at position 599, numbered according to the amino acid sequence of SEQ ID NO: 5, 8, or 3636.
[0148] 30. The isolated AAV particle of any one of embodiments 15 or 17-29, wherein the AAV capsid variant further comprises [N3], wherein [N3] comprises X6, X7, X8, and X9, wherein:
   [0149] (a) position X6 is: A, D, S, or T;
   [0150] (b) position X7 is: Q, K, H, L, P, or R;
   [0151] (c) position X8 is: A, P, E, or R; and
   [0152] (d) position X9 is: Q, H, K, or P; and/or an amino acid modification, e.g., a conservative substitution, of any of the aforesaid amino acids in (a)-(d).
[0153] 31. The isolated AAV particle of embodiment 30, wherein:
   [0154] (a) position X6 is: A, D, S;
   [0155] (b) position X7 is Q or K;
   [0156] (c) position X8 is A or P; and/or
   [0157] (d) position X9 is Q.
[0158] 32. The isolated AAV particle of embodiment 30 or 31, wherein [N3] comprises AQ, SQ, AK, DQ, PQ, QA, QP, or KA.
[0159] 33. The isolated AAV particle of any one of embodiments 30-32, wherein [N3] comprises AQA, AQP, SQA, AKA, DQA, QAQ, QPQ, or KAQ.
[0160] 34. The isolated AAV particle of any one of embodiments 30-33, wherein [N3] is or comprises AQAQ (SEQ ID NO: 4737), SQAQ (SEQ ID NO: 4738), AQPQ (SEQ ID NO: 4739), AQSQ (SEQ ID NO: 4740), AKAQ (SEQ ID NO: 4741), AHAQ (SEQ ID NO: 4742), AQAP (SEQ ID NO: 4743), DQAQ (SEQ ID NO: 4744), APAQ (SEQ ID NO: 4745), AQAK (SEQ ID NO: 4746), AQAH (SEQ ID NO: 4747), AQEQ (SEQ ID NO: 4748), ALAQ (SEQ ID NO: 4749), ARAQ (SEQ ID NO: 4750), or TQAQ (SEQ ID NO: 4751).
[0161] 35. The isolated AAV particle of any one of embodiments 16 or 30-34, wherein [N3] is or comprises AQAQ (SEQ ID NO: 4737), AQPQ (SEQ ID NO: 4739), SQAQ (SEQ ID NO: 4738), AKAQ (SEQ ID NO: 4741), or DQAQ (SEQ ID NO: 4744).
[0162] 36. The isolated AAV particle of any one of embodiments 16 or 30-35, wherein [N3] is or comprises AQAQ (SEQ ID NO: 4737).
[0163] 37. The isolated AAV particle of any one of embodiments 16 or 30-36, wherein [N2]-[N3] comprises:

(i)
(SEQ ID NO: 4797)
VHLYAQAQ,
(SEQ ID NO: 4798)
VHLYAQPQ,
(SEQ ID NO: 4799)
VHLYSQAQ,
(SEQ ID NO: 4800)
VHLYAKAQ,
(SEQ ID NO: 4801)
VHLYDQAQ,
(SEQ ID NO: 4802)
VHIYAQAQ,
(SEQ ID NO: 4803)
VHVYAQAQ,
(SEQ ID NO: 4804)
VHHYAQAQ;

[0164] (ii) an amino acid sequence comprising any portion of an amino acid sequence in (i), e.g., any 2, 3, 4, 5, 6, or 7 amino acids, e.g., consecutive amino acids, thereof;
[0165] (iii) an amino acid sequence comprising at least one, two, or three but no more than four modifications, e.g., substitutions (e.g., conservative substitutions), insertions, or deletions, relative to any of the amino acid sequences in (i); or
[0166] (iv) an amino acid sequence comprising at least one, two, or three but no more than four different amino acids, relative to any one of the amino acid sequences in (i).
[0167] 38. The isolated AAV particle of any one of embodiments 16 or 30-37, wherein [N2]-[N3] is or comprises VHLYAQAQ (SEQ ID NO: 4797).
[0168] 39. The isolated AAV particle of any one of embodiments 30-38, wherein [N1]-[N2]-[N3] comprises:

(i)
(SEQ ID NO: 4805)
ALDGAVHLYAQ,
(SEQ ID NO: 4806)
ALNGAVHLYAQ,
(SEQ ID NO: 4807)
PINGAVHLYAQ,
(SEQ ID NO: 4808)
PLDGAVHLYAQ,
(SEQ ID NO: 4809)
PLDGAVHLYSQ,
(SEQ ID NO: 4810)
PLDSAVHLYAQ,
(SEQ ID NO: 4811)
PLDSSVHLYAQ,
(SEQ ID NO: 4812)
PLNGAVHLYAK,
(SEQ ID NO: 4813)
PLNGAVHLYAQ,
(SEQ ID NO: 4814)
PLNGAVHLYDQ,
(SEQ ID NO: 4815)
PLNGAVHLYSQ,
(SEQ ID NO: 4816)
PLNGGVHLYAQ,
(SEQ ID NO: 4817)
PLNGNVHLYAQ,
(SEQ ID NO: 4818)
PLNGSVHLYAQ,
(SEQ ID NO: 4819)
PLNGTVHLYAQ,
(SEQ ID NO: 4820)
QLNGAVHLYAQ,
(SEQ ID NO: 4821)
SLDGAVHLYAQ,
(SEQ ID NO: 4822)
SLNGAVHLYAQ,
(SEQ ID NO: 4823)
TLNGAVHLYAQ,
(SEQ ID NO: 4824)
PLNGAVHIYAQ,
(SEQ ID NO: 4825)
PLDGAVHVYAQ,
or
(SEQ ID NO: 4826)
PLNGAVHHYAQ;

[0169] (ii) an amino acid sequence comprising any portion of an amino acid sequence in (i), e.g., any 2, 3, 4, 5, 6, 7, 8, 9, or 10 amino acids, e.g., consecutive amino acids, thereof;
[0170] (iii) an amino acid sequence comprising at least one, two, or three but no more than four modifications, e.g., substitutions (e.g., conservative substitutions), insertions, or deletions, relative to any of the amino acid sequences in (i); or
[0171] (iv) an amino acid sequence comprising at least one, two, or three but no more than four different amino acids, relative to any one of the amino acid sequences in (i).
[0172] 40. The isolated AAV particle of any one of embodiments 16 or 30-39, wherein [N1]-[N2]-[N3] is or comprises:

(i)
(SEQ ID NO: 4836)
PLNGAVHLYAQAQ,
(SEQ ID NO: 4827)
ALDGAVHLYAQAQ,
(SEQ ID NO: 4828)
ALNGAVHLYAQAQ,
(SEQ ID NO: 4829)
PINGAVHLYAQAQ,
(SEQ ID NO: 4830)
PLDGAVHLYAQAQ,
(SEQ ID NO: 4831)
PLDGAVHLYAQPQ,
(SEQ ID NO: 4832)
PLDGAVHLYSQAQ,
(SEQ ID NO: 4833)
PLDSAVHLYAQAQ,
(SEQ ID NO: 4834)
PLDSSVHLYAQAQ,
(SEQ ID NO: 4835)
PLNGAVHLYAKAQ,
(SEQ ID NO: 4837)
PLNGAVHLYAQPQ,
(SEQ ID NO: 4838)
PLNGAVHLYDQAQ,
(SEQ ID NO: 4839)
PLNGAVHLYSQAQ,
(SEQ ID NO: 4840)
PLNGGVHLYAQAQ,
(SEQ ID NO: 4841)
PLNGNVHLYAQAQ,
(SEQ ID NO: 4842)
PLNGSVHLYAQAQ,
(SEQ ID NO: 4843)
PLNGTVHLYAQAQ,
(SEQ ID NO: 4844)
QLNGAVHLYAQAQ,
(SEQ ID NO: 4845)
SLDGAVHLYAQAQ,
(SEQ ID NO: 4846)
SLNGAVHLYAQAQ,
(SEQ ID NO: 4847)
TLNGAVHLYAQAQ,
(SEQ ID NO: 4848)
PLNGAVHIYAQAQ,
(SEQ ID NO: 4849)
PLDGAVHVYAQAQ,
or
(SEQ ID NO: 4850)
PLNGAVHHYAQAQ;

[0173] (ii) an amino acid sequence comprising any portion of an amino acid sequence in (i), e.g., any 2, 3, 4, 5, 6, 7, 8, 9, 10, 11, or 12 amino acids, e.g., consecutive amino acids, thereof;
[0174] (iii) an amino acid sequence comprising at least one, two, or three but no more than four modifications, e.g., substitutions (e.g., conservative substitutions), insertions, or deletions, relative to any of the amino acid sequences in (i); or
[0175] (iv) an amino acid sequence comprising at least one, two, or three but no more than four different amino acids, relative to any one of the amino acid sequences in (i).
[0176] 41. The isolated AAV particle of any one of embodiments 16 or 30-40, wherein [N1]-[N2]-[N3] is or comprises PLNGAVHLYAQAQ (SEQ ID NO: 4836).
[0177] 42. The isolated AAV particle of any one of embodiments 15-41, wherein the AAV capsid variant further comprises one, two, or all of an amino acid other than T at position 593 (e.g., V, L, R, S, A, C, I, K, M, N, P, or Q), an amino acid other than G at position 594 (e.g., S, A, T, M, V, Q, L, H, I, K, N, P, R, or Y), and/or an amino acid other than W at position 595 (e.g., S, P, G, A, Q, L, M, K, C, E, F, H, R, T, V, or Y), relative to a reference sequence numbered according to the amino acid sequence of SEQ ID NO: 138.
[0178] 43. The isolated AAV particle of any one of embodiments 15-42, wherein the AAV capsid variant further comprises one, two, or all of an amino acid other than T at position 600 (e.g., V, L, R, S, A, C, I, K, M, N, P, or Q), an amino acid other than G at position 601 (e.g., S, A, T, M, V, Q, L, H, I, K, N, P, R, or Y), and/or an amino acid other than W at position 602 (e.g., S, P, G, A, Q, L, M, K, C, E, F, H, R, T, V, or Y), relative to a reference sequence numbered according to the amino acid sequence of SEQ ID NO: 5, 8, or 3636.
[0179] 44. The isolated AAV particle of any one of embodiments 15-43, wherein the AAV capsid variant further comprises one, two, or all of:
   [0180] (i) the amino acid V, L, R, S, A, C, I, K, M, N, P, or Q (e.g., L) at position 593 numbered according to SEQ ID NO: 138 or at position 600 numbered according to SEQ ID NO: 5, 8, or 3636);
   [0181] (ii) the amino acid S, A, T, M, V, Q, L, H, I, K, N, P, R, or Y (e.g., S) at position 594 numbered according to SEQ ID NO: 138, or at position 601 numbered according to SEQ ID NO: 5, 8, or 3636; and/or
   [0182] (iii) the amino acid S, P, G, A, Q, L, M, K, C, E, F, H, R, T, V, or Y (e.g. P) at position 595 numbered according to SEQ ID NO: 138 or at position 602 numbered according to SEQ ID NO: 5, 8, or 3636).
[0183] 45. The isolated AAV particle of any one of embodiments 15-44, wherein the AAV capsid variant further comprises:
   [0184] (i) the amino acid L at position 593 numbered according to SEQ ID NO: 138 or at position 600 numbered according to SEQ ID NO: 5, 8, or 3636;
   [0185] (ii) the amino acid S at position 594 numbered according to SEQ ID NO: 138, or at position 601 numbered according to SEQ ID NO: 5, 8, or 3636; and
   [0186] (iii) the amino acid P at position 595 numbered according to SEQ ID NO: 138 or at position 602 numbered according to SEQ ID NO: 5, 8, or 3636.
[0187] 46. The isolated AAV particle of any one of embodiments 15-41, wherein the AAV capsid variant further comprises:
   [0188] (i) T at position 593, G at position 594, and/or W at position 595, numbered according to SEQ ID NO: 138;
   [0189] (ii) T at position 600, G at position 601, and/or W at position 602, numbered according to SEQ ID NO: 5, 8, or 3636.
[0190] 47. The isolated AAV particle of any one of embodiments 15 or 17-46, wherein the AAV capsid variant further comprises [N4], wherein [N4] comprises X10, X11, and X12, wherein:
   [0191] (a) position X10 is: T, V, L, R, S, A, C, I, K, M, N, P, or Q;
   [0192] (b) position X11 is: G, S, A, T, M, V, Q, L, H, I, K, N, P, R, or Y; and
   [0193] (c) position X12 is: W, S, P, G, A, Q, L, M, K, C, E, F, H, R, T, V, or Y; and/or an amino acid modification, e.g., a conservative substitution, of any of the aforesaid amino acids in (a)-(c).
[0194] 48. The isolated AAV particle of embodiment 47, wherein:
   [0195] (a) position X10 is: T, V, L, A, R, C, S, I, M, N, P, Q;
   [0196] (b) position X11 is: G, A, S, T, M, Q, V; and/or
   [0197] (c) position X12 is: P, S, W, G, A, Q, T, K, N, R, L, M, H, V, C, or E.
[0198] 49. The isolated AAV particle of any one of embodiments 47 or 48, wherein [N4] comprises LS, TG, LA, LT, SA, SS, TL, TT, TS, TA, TV, VS, AA, AG, AS, AT, CS, CT, IA, IG, IL, IQ, IS, IT, LG, LH, LK, LM, LN, LQ, MA, NA, NM, NS, NT, NV, QA, RA, RG, RI, RL, RM, RN, RQ, RS, RT, RV, SG, SM, ST, SV, TK, TM, TN, TP, TQ, TR, VA, VG, VH, VK, VL, VM, VN, VQ, VR, VT, PG, LV, SP, GW, AP, GR, AL, AW, GG, GS, GP, QP, QS, AH, AN, AQ, AR, GQ, HP, KS, MG, MP, MQ, MS, NP, QQ, QR, SH, SK, SQ, SR, IP, VE, AK, AM, AV, GA, GC, GT, KA, KP, KQ, LP, MK, MN, MT, NQ, PP, QH, QK, QM, QN, QT, RW, SL, VW, GK, GN, NG, RP, SN, GL, or VP.
[0199] 50. The isolated AAV particle of any one of embodiments 16 or 47-49, wherein [N4] is or comprises TGW, TGL, TGS, TGG, TAW, TGR, TAS, LSS, TSS, SSL, SSS, TLS, TVS, VSS, TSP, VSP, TMS, LSP, VAS, TAL, TTS, TLP, VLP, RGW, LSG, LAS, SSP, LLP, STS, TSA, TTP, SAL, LGS, VTP, VSA, IGW, TGF, LTP, TLA, LSA, TVG, TAP, TMP, TSL, VQS, SSM, SLP, VSQ, RSS, TST, VMS, TTA, TQP, LST, LAP, TVA, RLS, TGY, TSG, TAG, VMP, TSQ, TMA, VGS, TSW, TGV, TGT, TLG, LMP, VQP, TGM, SMS, SQL, IGS, RSV, TAA, STP, LSQ, TAQ, TGP, ASP, VSG, SAP, TLQ, LQP, TAT, TGQ, ATS, IGG, VAA, TSM, TVW, TAM, TGA, VAT, QSP, TQA, VQA, RSP, LAT, VAQ, LAA, RST, RTL, LGT, LMS, LGP, RTS, SQP, VLG, SVS, TMQ, SAV, LAG, SGP, TNS, RLT, TTQ, SAA, TSV, RLG, RAS, STQ, CSP, SAG, ALP, VTS, ISP, SVG, LTS, TTT, RSG, TQL, LNP, TVQ, IAS, LAQ, LSR, LSN, TTG, TSN, SMA, TKS, SVA, TQQ, VQQ, RLP, SAM, TAV, TQW, SSR, TQT, VNS, RSA, LMG, RQS, LVG, VTA, RTT, SMG, VMA, TKP, SAQ, NSP, ATP, VAG, RGS, VKP, RMS, NLP, NAL, RTP, RQL, VQG, VTG, VST, NAS, RVE, ATG, AMS, RNS, VMQ, SMQ, LQQ, TMG, LGQ, TSH, AAP, RSQ, TYS, ITP, VAK, TQM, TKA, SQQ, ISG, VSR, RTA, RML, SQM, VAN, CTP, ISS, AGP, TAK, RTG, LHP, TMT, AQP, QAP, RQP, LKS, NTT, TSK, RYS, KSS, NTP, VGG, IAA, LMA, MAP, VHP, VLS, LAN, ATQ, TNA, TAN, VSN, AAA, AVG, LTA, SAN, RAG, RQG, TLR, LSH, SAF, RAA, IQP, ILG, VNG, SVQ, LSK, TNG, RTQ, TMN, RGG, TTR, VRP, VKA, LAR, NQP, TMK, TYA, TQK, TTK, IAG, TQN, LAH, NTQ, RQQ, RAQ, TKQ, TQH, TNQ, LMQ, VNA, VQT, TQR, VGK, VKQ, IQS, LQR, TMM, VGN, RIG, SAK, RIA, VQN, NVQ, RIP, NAQ, NMQ, TPS, LTN, VTK, PGW, LPP, SPP, TPA, TGC, VPP, TPT, TPW, TPP, RPP, TPQ, TPR, TPG, VPA, VPQ, RPG, KGW, TRW, TAR, IPP, RSL, LVP, KGS, VAP, KGG, KAW, PGS, TRL, or AGW.
[0200] 51. The isolated AAV particle of any one of embodiments 16 or 47-50, wherein [N4] is or comprises LSP, TGW, LAA, LTP, SAP, SSP, TGR, TLA, TTS, TSP, TAL, TAW, TGG, TGS, TVS, VSP, VSS, AAP AGP, ASP, ATP, CSP, CTP, IAA, IAG, IAS, IGG, IGS, ILG, IQP, IQS, ISG, ISP, ISS, ITP, LAG, LAH, LAN, LAP, LAQ, LAR, LAS, LAT, LGP, LGQ, LGS, LHP, LKS, LMA, LMG, LMP, LMQ, LMS, LNP, LQP, LQQ, LQR, LSH, LSK, LSQ, LSR, LST, LTA, LTN, LTS, MAP, NAQ, NAS, NMQ, NSP, NTP, NVQ, QAP, RAA, RAQ, RAS, RGG, RGS, RIA, RIG, RIP, RLG, RLS, RMS, RNS, RQP, RSA, RSG, RSP, RSQ, RSS, RST, RTA, RTG, RTL, RTS, RTT, RVE, SAA, SAK, SAM, SAQ, SGP, SMA, SMG, SMQ, SMS, STP, SVA, SVG, TAA, TAG, TAK, TAM, TAN, TAP, TAQ, TAS, TAT, TAV, TGA, TGC, TGP, TGT, TKA, TKP, TKQ, TKS, TLP, TLQ, TMA, TMG, TMK, TMN, TMP, TMQ, TMS, TMT, TNA, TNQ, TNS, TPP, TQH, TQK, TQM, TQN, TQP, TQQ, TQT, TRW, TSA, TSG, TSH, TSK, TSL, TSM, TSQ, TSS, TST, TSV, TTA, TTG, TTK, TTP, TTQ, TTT, TVA, TVG, TVQ, TVW, VAA, VAG, VAK, VAN, VAQ, VAS, VAT, VGG, VGK, VGN, VGS, VHP, VKA, VKP, VKQ, VLP, VLS, VMA, VMQ, VMS, VNA, VNG, VNS, VQA, VQN, VQP, VQQ, VQS, VQT, VRP, VSA, VSG, VSN, VSQ, VSR, VST, VTA, VTG, VTK, VTP, VTS, TGL, PGW, LSG, LSS, or LVP.
[0201] 52. The isolated AAV particle of any one of embodiments 16 or 47-50, wherein [N4] is or comprises TGW.
[0202] 53. The isolated AAV particle of any one of embodiments 16 or 47-50, wherein [N4] is or comprises LSP.
[0203] 54. The isolated AAV particle of any one of embodiments 15-53, wherein the AAV capsid variant further comprises one, two, or all of an amino acid other than V at position 596 (e.g., D, F, G, L, A, E, or I), an amino acid other than Q at position 597 (e.g., K, R, H, E, L, or P), and/or an amino acid other than N at position 598 (e.g., T, K, H, D, Y, S, I, or P), relative to a reference sequence numbered according to the amino acid sequence of SEQ ID NO: 138.
[0204] 55. The isolated AAV particle of any one of embodiments 15-54, wherein the AAV capsid variant further comprises one, two, or all of an amino acid other than V at position 603 (e.g., D, F, G, L, A, E, or I), an amino acid other than Q at position 604 (e.g., K, R, H, E, L, or P), and/or an amino acid other than N at position 605 (e.g., T, K, H, D, Y, S, I, or P), relative to a reference sequence numbered according to the amino acid sequence of SEQ ID NO: 5, 8, or 3636.
[0205] 56. The isolated AAV particle of any one of embodiments 15-55, wherein the AAV capsid variant further comprises one, two, or all of:
   [0206] (i) the amino acid V, D, F, G, L, A, E, or I at position 596 numbered according to SEQ ID NO: 138 or at position 603 numbered according to SEQ ID NO: 5, 8, or 3636;
   [0207] (ii) the amino acid K, R, H, E, L, or P at position 597 numbered according to SEQ ID NO: 138 or at position 604 numbered according to SEQ ID NO: 5, 8, or 3636; and/or
   [0208] (iii) the amino acid N, T, K, H, D, Y, S, I, or P at position 598 numbered according to the amino acid sequence of SEQ ID NO: 138 or at position 605 numbered according to SEQ ID NO: 5, 8, or 3636.
[0209] 57. The isolated AAV particle of any one of embodiments 15-56, wherein the AAV capsid variant further comprises one, two, or all of:
   [0210] (i) the amino acid V at position 596 numbered according to SEQ ID NO: 138 or at position 603 numbered according to SEQ ID NO: 5, 8, or 3636;
   [0211] (ii) the amino acid K, P, E or H at position 597 numbered according to SEQ ID NO: 138 or at position 604 numbered according to SEQ ID NO: 5, 8, or 3636; and
   [0212] (iii) the amino acid N at position 598 numbered according to the amino acid sequence of SEQ ID NO: 138 or at position 605 numbered according to SEQ ID NO: 5, 8, or 3636.
[0213] 58. The isolated AAV particle of any one of embodiments 15 or 17-57, wherein the AAV capsid variant further comprises [N5], wherein [N5] comprises X13, X14, and X15, wherein:
   [0214] (a) position X13 is: V, D, F, G, L, A, E, or I;
   [0215] (b) position X14 is: Q, K, R, H, E, L, or P; and
   [0216] (c) position X15 is: N, T, K, H, D, Y, S, I, or P; and/or an amino acid modification, e.g., a conservative substitution, of any of the aforesaid amino acids in (a)-(c).
[0217] 59. The isolated AAV particle of embodiment 58, wherein:
   [0218] (a) position X13 is: V, D, A, F, E, G, or L;
   [0219] (b) position X14 is: Q, K, R, L, or P; and/or
   [0220] (c) position X15 is: N, T, K, H, D, I, K, S, or P.
[0221] 60. The isolated AAV particle of embodiment 58 or 59, wherein position X14 is P.
[0222] 61. The isolated AAV particle of embodiment 58 or 59, wherein position X14 is K.
[0223] 62. The isolated AAV particle of embodiment 58 or 59, wherein position X14 is E or H.
[0224] 63. The isolated AAV particle of embodiment 58 or 59, wherein position X14 is Q.
[0225] 64. The isolated AAV particle of any one of embodiment 58-63, wherein [N5] comprises VQ, AQ, DQ, FQ, VL, LQ, EQ, GQ, VP, VR, VK, QN, QS, QT, QK, QH, LN, QI, PN, QD, QP, RN, or KN.
[0226] 65. The isolated AAV particle of any one of embodiments 16 or 58-64, wherein [N5] is or comprises VQN, VKN, VQT, VQK, DQN, VQH, GQN, VQI, VHN, FQN, LQN, VLN, VRN, VQS, VQY, AQN, VEN, VQD, VPN, IQN, VKK, DKN, VKT, VQP, EQN, GQT, FQK, GHN, or VPH.
[0227] 66. The isolated AAV particle of any one of embodiments 16 or 58-65, wherein [N5] is or comprises VQN, AQN, VQS, DQN, VQT, VQK, VQH, FQN, VLN, LQN, VQI, EQN, GQT, VPN, VQD, VQP, VRN, or VKN.
[0228] 67. The isolated AAV particle of any one of embodiments 16 or 58-66, wherein [N5] is or comprises VKN, VPN, VEN, or VHN.
[0229] 68. The isolated AAV particle of any one of embodiments 16 or 58-66, wherein [N5] is or comprises VQN.
[0230] 69. The isolated AAV particle of any one of embodiments 16 or 58-68, wherein [N4]-[N5] is or comprises:

(i)
(SEQ ID NO: 4851)
TGWVQN,
(SEQ ID NO: 4852)
LAAVQN,
(SEQ ID NO: 4853)
LTPVQN,
(SEQ ID NO: 4854)
SAPVQN,
(SEQ ID NO: 4855)
SSPVQN,
(SEQ ID NO: 4856)
TGRVQN,
(SEQ ID NO: 4857)
TGWAQN,
(SEQ ID NO: 4858)
TGWVQS,
(SEQ ID NO: 4859)
TLAVQN,
(SEQ ID NO: 4860)
TTSVQN,
(SEQ ID NO: 4861)
TSPVQN,
(SEQ ID NO: 4862)
TALVQN,
(SEQ ID NO: 4863)
TAWVQN,
(SEQ ID NO: 4864)
TGGVQN,
(SEQ ID NO: 4865)
TGSVQN,
(SEQ ID NO: 4866)
TGWDQN,
(SEQ ID NO: 4867)
TVSVQN,
(SEQ ID NO: 4868)
VSPVQN,
(SEQ ID NO: 4869)
VSSVQN,
(SEQ ID NO: 4870)
AAPVQN,
(SEQ ID NO: 4871)
AGPVQN,
(SEQ ID NO: 4872)
ASPVQN,
(SEQ ID NO: 4873)
ATPVQN,
(SEQ ID NO: 4874)
CSPVQN,
(SEQ ID NO: 4875)
CTPVQN,
(SEQ ID NO: 4876)
IAAVQN,
(SEQ ID NO: 4877)
IAGVQN,
(SEQ ID NO: 4878)
IASVQN,
(SEQ ID NO: 4879)
IGGVQN,
(SEQ ID NO: 4880)
IGSVQN,
(SEQ ID NO: 4881)
ILGVQN,
(SEQ ID NO: 4882)
IQPVQN,
(SEQ ID NO: 4883)
IQSVQN,
(SEQ ID NO: 4884)
ISGVQN,
(SEQ ID NO: 4885)
ISPVQN,
(SEQ ID NO: 4886)
ISSVQN,
(SEQ ID NO: 4887)
ITPVQN,
(SEQ ID NO: 4888)
LAGVQN,
(SEQ ID NO: 4889)
LAHVQN,
(SEQ ID NO: 4890)
LANVQN,
(SEQ ID NO: 4891)
LAPVQN,
(SEQ ID NO: 4892)
LAPVQT,
(SEQ ID NO: 4893)
LAQVQN,
(SEQ ID NO: 4894)
LARVQN,
(SEQ ID NO: 4895)
LASVQN,
(SEQ ID NO: 4896)
LATVQN,
(SEQ ID NO: 4897)
LGPVQN,
(SEQ ID NO: 4898)
LGQVQN,
(SEQ ID NO: 4899)
LGSVQN,
(SEQ ID NO: 4900)
LHPVQN,
(SEQ ID NO: 4901)
LKSVQN,
(SEQ ID NO: 4902)
LMAVQN,
(SEQ ID NO: 4903)
LMGVQN,
(SEQ ID NO: 4904)
LMPVQN,
(SEQ ID NO: 4905)
LMQVQN,
(SEQ ID NO: 4906)
LMSVQN,
(SEQ ID NO: 4907)
LNPVQN,
(SEQ ID NO: 4908)
LQPVQN,
(SEQ ID NO: 4909)
LQQVQN,
(SEQ ID NO: 4910)
LQRVQN,
(SEQ ID NO: 4911)
LSHVQN,
(SEQ ID NO: 4912)
LSKVQN,
(SEQ ID NO: 4913)
LSPVQK,
(SEQ ID NO: 4914)
LSPVQN,
(SEQ ID NO: 4915)
LSQVQN,
(SEQ ID NO: 4916)
LSRVQN,
(SEQ ID NO: 4917)
LSTVQN,
(SEQ ID NO: 4918)
LTAVQN,
(SEQ ID NO: 4919)
LTNVQN,
(SEQ ID NO: 4920)
LTSVQN,
(SEQ ID NO: 4921)
MAPVQN,
(SEQ ID NO: 4922)
NAQVQN,
(SEQ ID NO: 4923)
NASVQN,
(SEQ ID NO: 4924)
NMQVQN,
(SEQ ID NO: 4925)
NSPVQN,
(SEQ ID NO: 4926)
NTPVQN,
(SEQ ID NO: 4927)
NVQVQN,
(SEQ ID NO: 4928)
QAPVQN,
(SEQ ID NO: 4929)
RAAVQN,
(SEQ ID NO: 4930)
RAQVQN,
(SEQ ID NO: 4931)
RASVQN,
(SEQ ID NO: 4932)
RGGVQN,
(SEQ ID NO: 4933)
RGSVQN,
(SEQ ID NO: 4934)
RIAVQN,
(SEQ ID NO: 4935)
RIGVQN,
(SEQ ID NO: 4936)
RIPVQN,
(SEQ ID NO: 4937)
RLGVQN,
(SEQ ID NO: 4938)
RLSVQN,
(SEQ ID NO: 4939)
RMSVQN,
(SEQ ID NO: 4940)
RNSVQN,
(SEQ ID NO: 4941)
RQPVQN,
(SEQ ID NO: 4942)
RSAVQN,
(SEQ ID NO: 4943)
RSGVQN,
(SEQ ID NO: 4944)
RSPVQN,
(SEQ ID NO: 4945)
RSQVQN,
(SEQ ID NO: 4946)
RSSVQN,
(SEQ ID NO: 4947)
RSTVQN,
(SEQ ID NO: 4948)
RTAVQN,
(SEQ ID NO: 4949)
RTGVQN,
(SEQ ID NO: 4950)
RTLVQN,
(SEQ ID NO: 4951)
RTSVQN,
(SEQ ID NO: 4952)
RTTVQN,
(SEQ ID NO: 4953)
RVEVQN,
(SEQ ID NO: 4954)
SAAVQN,
(SEQ ID NO: 4955)
SAKVQN,
(SEQ ID NO: 4956)
SAMVQN,
(SEQ ID NO: 4957)
SAQVQN,
(SEQ ID NO: 4958)
SGPVQN,
(SEQ ID NO: 4959)
SMAVQN,
(SEQ ID NO: 4960)
SMGVQN,
(SEQ ID NO: 4961)
SMQVQN,
(SEQ ID NO: 4962)
SMSVQN,
(SEQ ID NO: 4963)
STPVQN,
(SEQ ID NO: 4964)
SVAVQN,
(SEQ ID NO: 4965)
SVGVQN,
(SEQ ID NO: 4966)
TAAVQN,
(SEQ ID NO: 4967)
TAGVQN,
(SEQ ID NO: 4968)
TAKVQN,
(SEQ ID NO: 4969)
TAMVQN,
(SEQ ID NO: 4970)
TANVQN,
(SEQ ID NO: 4971)
TAPVQN,
(SEQ ID NO: 4972)
TAPVQT,
(SEQ ID NO: 4973)
TAQVQN,
(SEQ ID NO: 4974)
TASVQN,
(SEQ ID NO: 4975)
TASVQT,
(SEQ ID NO: 4976)
TATVQN,
(SEQ ID NO: 4977)
TAVVQN,
(SEQ ID NO: 4978)
TAWDON,
(SEQ ID NO: 4979)
TAWVQH,
(SEQ ID NO: 4980)
TAWVQT,
(SEQ ID NO: 4981)
TGAVQN,
(SEQ ID NO: 4982)
TGCFQN,
(SEQ ID NO: 4983)
TGGAQN,
(SEQ ID NO: 4984)
TGGFQN,
(SEQ ID NO: 4985)
TGGVLN,
(SEQ ID NO: 4986)
TGGVQH,
(SEQ ID NO: 4987)
TGGVQK,
(SEQ ID NO: 4988)
TGGVQT,
(SEQ ID NO: 4989)
TGPVQN,
(SEQ ID NO: 4990)
TGSAQN,
(SEQ ID NO: 4991)
TGSLON,
(SEQ ID NO: 4992)
TGSVQH,
(SEQ ID NO: 4993)
TGSVQI,
(SEQ ID NO: 4994)
TGSVQS,
(SEQ ID NO: 4995)
TGSVQT,
(SEQ ID NO: 4996)
TGTVQN,
(SEQ ID NO: 4997)
TGWEQN,
(SEQ ID NO: 4998)
TGWFQN,
(SEQ ID NO: 4999)
TGWGQT,
(SEQ ID NO: 5000)
TGWVPN,
(SEQ ID NO: 5001)
TGWVQD,
(SEQ ID NO: 5002)
TGWVQP,
(SEQ ID NO: 5003)
TGWVQT,
(SEQ ID NO: 5004)
TGWVRN,
(SEQ ID NO: 5005)
TKAVQN,
(SEQ ID NO: 5006)
TKPVQN,
(SEQ ID NO: 5007)
TKQVQN,
(SEQ ID NO: 5008)
TKSVQN,
(SEQ ID NO: 5009)
TLPVQN,
(SEQ ID NO: 5010)
TLQVQN,
(SEQ ID NO: 5011)
TMAVQN,
(SEQ ID NO: 5012)
TMGVQN,
(SEQ ID NO: 5013)
TMKVQN,
(SEQ ID NO: 5014)
TMNVQN,
(SEQ ID NO: 5015)
TMPVQN,
(SEQ ID NO: 5016)
TMQVQN,
(SEQ ID NO: 5017)
TMSVKN,
(SEQ ID NO: 5018)
TMSVQN,
(SEQ ID NO: 5019)
TMSVQT,
(SEQ ID NO: 5020)
TMTVQN,
(SEQ ID NO: 5021)
TNAVQN,
(SEQ ID NO: 5022)
TNQVQN,
(SEQ ID NO: 5023)
TNSVQN,
(SEQ ID NO: 5024)
TPPVQN,
(SEQ ID NO: 5025)
TQHVQN,
(SEQ ID NO: 5026)
TQKVQN,
(SEQ ID NO: 5027)
TQMVQN,
(SEQ ID NO: 5028)
TQNVQN,
(SEQ ID NO: 5029)
TQPVQN,
(SEQ ID NO: 5030)
TQQVQN,
(SEQ ID NO: 5031)
TQTVQN,
(SEQ ID NO: 5032)
TRWDQN,
(SEQ ID NO: 5033)
TSAVQN,
(SEQ ID NO: 5034)
TSGVQN,
(SEQ ID NO: 5035)
TSHVQN,
(SEQ ID NO: 5036)
TSKVQN,
(SEQ ID NO: 5037)
TSLVQN,
(SEQ ID NO: 5038)
TSMVQN,
(SEQ ID NO: 5039)
TSPDQN,
(SEQ ID NO: 5040)
TSQVQN,
(SEQ ID NO: 5041)
TSSVQN,
(SEQ ID NO: 5042)
TSSVQT,
(SEQ ID NO: 5043)
TSTVQN,
(SEQ ID NO: 5044)
TSVVQN,
(SEQ ID NO: 5045)
TTAVQN,
(SEQ ID NO: 5046)
TTGVQN,
(SEQ ID NO: 5047)
TTKVQN,
(SEQ ID NO: 5048)
TTPVQN,
(SEQ ID NO: 5049)
TTPVQT,
(SEQ ID NO: 5050)
TTQVQN,
(SEQ ID NO: 5051)
TTTVQN,
(SEQ ID NO: 5052)
TVAVQN,
(SEQ ID NO: 5053)
TVAVQT,
(SEQ ID NO: 5054)
TVGVQN,
(SEQ ID NO: 5055)
TVQVQN,
(SEQ ID NO: 5056)
TVSVKN,
(SEQ ID NO: 5057)
TVWVQK,
(SEQ ID NO: 5058)
VAAVQN,
(SEQ ID NO: 5059)
VAGVQN,
(SEQ ID NO: 5060)
VAKVQN,
(SEQ ID NO: 5061)
VANVQN,
(SEQ ID NO: 5062)
VAQVQN,
(SEQ ID NO: 5063)
VASVQN,
(SEQ ID NO: 5064)
VATVQN,
(SEQ ID NO: 5065)
VGGVQN,
(SEQ ID NO: 5066)
VGKVQN,
(SEQ ID NO: 5067)
VGNVQN,
(SEQ ID NO: 5068)
VGSVQN,
(SEQ ID NO: 5069)
VHPVQN,
(SEQ ID NO: 5070)
VKAVQN,
(SEQ ID NO: 5071)
VKPVQN,
(SEQ ID NO: 5072)
VKQVQN,
(SEQ ID NO: 5073)
VLPVQN,
(SEQ ID NO: 5074)
VLSVQN,
(SEQ ID NO: 5075)
VMAVQN,
(SEQ ID NO: 5076)
VMQVQN,
(SEQ ID NO: 5077)
VMSVQN,
(SEQ ID NO: 5078)
VNAVQN,
(SEQ ID NO: 5079)
VNGVQN,
(SEQ ID NO: 5080)
VNSVQN,
(SEQ ID NO: 5081)
VQAVQN,
(SEQ ID NO: 5082)
VQNVQN,
(SEQ ID NO: 5083)
VQPVQN,
(SEQ ID NO: 5084)
VQQVQN,
(SEQ ID NO: 5085)
VQSVQN,
(SEQ ID NO: 5086)
VQTVQN,
(SEQ ID NO: 5087)
VRPVQN,
(SEQ ID NO: 5088)
VSAVQN,
(SEQ ID NO: 5089)
VSGVQN,
(SEQ ID NO: 5090)
VSNVQN,
(SEQ ID NO: 5091)
VSPVQT,
(SEQ ID NO: 5092)
VSQVQN,
(SEQ ID NO: 5093)
VSRVQN,
(SEQ ID NO: 5094)
VSSVQK,
(SEQ ID NO: 5095)
VSSVQT,
(SEQ ID NO: 5096)
VSTVQN,
(SEQ ID NO: 5097)
VTAVQN,
(SEQ ID NO: 5098)
VTGVQN,
(SEQ ID NO: 5099)
VTKVQN,
(SEQ ID NO: 5100)
VTPVQN,
(SEQ ID NO: 5101)
VTSVQN,
(SEQ ID NO: 5102)
TGLVQN,
(SEQ ID NO: 5103)
TGWVKN,
(SEQ ID NO: 5104)
PGWVQN,
(SEQ ID NO: 5105)
TGWVQH,
(SEQ ID NO: 5106)
LSGVQN,
(SEQ ID NO: 5107)
LSSVQN,or
(SEQ ID NO: 5108)
LVPVQN;

[0231] (ii) an amino acid sequence comprising any portion of an amino acid sequence in (i), e.g., any 2, 3, 4, or 5 amino acids, e.g., consecutive amino acids, thereof;
[0232] (iii) an amino acid sequence comprising at least one, two, or three but no more than four modifications, e.g., substitutions (e.g., conservative substitutions), insertions, or deletions, relative to any of the amino acid sequences in (i); or
[0233] (iv) an amino acid sequence comprising at least one, two, or three but no more than four different amino acids, relative to any one of the amino acid sequences in (i).
[0234] 70. The isolated AAV particle of any one of embodiments 16 or 58-69, wherein [N4]-[N5] is or comprises TGWVQN (SEQ ID NO: 4851), LSPVKN (SEQ ID NO: 5109), or TGWVPN (SEQ ID NO: 5000).
[0235] 71. The isolated AAV particle of embodiment 16-70, wherein:
   [0236] (i) [N1] is or comprises: PLNGA (SEQ ID NO: 3679), QLNGA (SEQ ID NO: 4685), PLDGA (SEQ ID NO: 4691), PLDSS (SEQ ID NO: 4705), ALNGA (SEQ ID NO: 4686), PLNGS (SEQ ID NO: 4687), PLNGG (SEQ ID NO: 4689), SLNGA (SEQ ID NO: 4684), PLNGN (SEQ ID NO: 4693), PLNGT (SEQ ID NO: 4690), ALDGA (SEQ ID NO: 4698), PLDSA (SEQ ID NO: 4701), SLDGA (SEQ ID NO: 4694), TLNGA (SEQ ID NO: 4708), or PINGA (SEQ ID NO: 4697);
   [0237] (ii) [N2] is or comprises: VHLY (SEQ ID NO: 4680), VHHY (SEQ ID NO: 4683), VHVY (SEQ ID NO: 4682), or VHIY (SEQ ID NO: 4681);
   [0238] (iii) [N3] is or comprises: AQAQ (SEQ ID NO: 4737), AQPQ (SEQ ID NO: 4739), AKAQ (SEQ ID NO: 4741), DQAQ (SEQ ID NO: 4744), or SQAQ (SEQ ID NO: 4738);
   [0239] (iv) [N4] is or comprises: LSP, TGW, TMS, TTK, TGS, TTS, TSP, TMK, VAQ, TGG, TAW, VKQ, SAP, LSK, LAP, LAQ, VAS, TAK, SAK, TGC, TQK, TGR, TVA, SSP, TTQ, TAQ, RIA, RAS, TTP, LAS, LTP, STP, VSQ, TMQ, TSK, VSP, TVQ, VTA, RQP, ISG, VRP, LGP, TNQ, VQQ, VAN, AAP, RST, TMA, IQP, IAS, TVS, RGS, NSP, LQP, VTG, VMQ, SMA, VGK, IQS, CSP, LQR, TPP, VTK, AGP, LAR, TTT, TLQ, VAK, RAA, TVG, LNP, LSQ, TKP, TNA, LAT, VTP, VQA, CTP, TAG, TSQ, TMN, TST, VKP, ASP, VAA, LKS, IAA, TAA, TKA, VSN, TAP, LMP, LHP, RAQ, LTN, RTT, TSV, TLA, RMS, VGN, LMQ, TAT, VHP, ISS, TRW, TMT, RSS, PGW, RTG, VAT, VTS, VSS, TSS, TNS, VKA, SGP, TGP, TAM, TQP, TQQ, VSR, VLP, LGS, VSA, VLS, TQH, QAP, NAQ, ATP, VQP, TTA, LAA, RSG, LMA, TMP, LAN, VST, SAQ, NTP, TGL, TLP, TAV, RLG, RTL, TQM, ITP, TVW, RSA, TAS, TMG, VQS, ISP, VGG, TAL, LAG, RTA, RSP, LAH, TSL, RLS, LMG, SMQ, TQT, VGS, VSG, VMA, IGG, IAG, LSH, VQT, RNS, TKQ, LGQ, NMQ, NVQ, RGG, VMS, TTG, LSR, MAP, ILG, TGT, TSH, RIG, SAM, TSM, SMG, SMS, TSG, TGA, VNS, VAG, IGS, VNG, LSS, LTA, VQN, TKS, SVG, NAS, TSA, TAN, LTS, RSQ, RIP, LVP, RVE, SVA, LSG, LQQ, LST, SAA, RTS, TQN, VNA, or LMS; and/or
   [0240] (v) [N5] is or comprises: VQN, DQN, VQH, FQN, VQD, VQS, VQT, VRN, AQN, VQP, VPN, VKN, VQK, EQN, VQI, LQN, GQT, or VLN.
[0241] 72. The isolated AAV particle of embodiment 16, wherein:
   [0242] (i) [N1] is or comprises: SLNGA (SEQ ID NO: 4684), QLNGA (SEQ ID NO: 4685), ALNGA (SEQ ID NO: 4686), PLNGS (SEQ ID NO: 4687), PVNGA (SEQ ID NO: 4688), PLNGA (SEQ ID NO: 3679), PLNGG (SEQ ID NO: 4689), PLNGT (SEQ ID NO: 4690), PLDGA (SEQ ID NO: 4691), QLNGS (SEQ ID NO: 4692), PLNGN (SEQ ID NO: 4693), SLDGA (SEQ ID NO: 4694), HLNGA (SEQ ID NO: 4695), ALNGT (SEQ ID NO: 4696), PINGA (SEQ ID NO: 4697), ALDGA (SEQ ID NO: 4698), PLNCA (SEQ ID NO: 4699), PLNGQ (SEQ ID NO: 4700), PLDSA (SEQ ID NO: 4701), RLDGA (SEQ ID NO: 4702), QLNGN (SEQ ID NO: 4703), PLNGY (SEQ ID NO: 4704), or PLDSS (SEQ ID NO: 4705);
   [0243] (ii) [N2] is or comprises: VHLY (SEQ ID NO: 4680) or VHVY (SEQ ID NO: 4682);
   [0244] (iii) [N3] is or comprises: AQAQ (SEQ ID NO: 4737), SQAQ (SEQ ID NO: 4738), AQPQ (SEQ ID NO: 4739), or AQSQ (SEQ ID NO: 4740);
   [0245] (iv) [N4] is or comprises: TGW, TGL, TGS, TGG, TAW, TGR, TAS, LSS, TSS, SSL, SSS, TLS, TVS, VSS, TSP, VSP, TMS, LSP, VAS, TAL, TTS, TLP, VLP, RGW, LSG, LAS, SSP, LLP, STS, TSA, TTP, SAL, LGS, VTP, VSA, IGW, TGF, LTP, TLA, LSA, TVG, TAP, TMP, TSL, VQS, SSM, SLP, VSQ, RSS, TST, VMS, TTA, TQP, LST, LAP, TVA, RLS, TGY, TSG, TAG, VMP, TSQ, TMA, VGS, TSW, TGV, TGT, TLG, LMP, VQP, TGM, SMS, SQL, IGS, RSV, TAA, STP, LSQ, TAQ, TGP, ASP, VSG, SAP, TLQ, LQP, TAT, TGQ, ATS, IGG, VAA, TSM, TVW, TAM, TGA, VAT, QSP, TQA, VQA, RSP, LAT, VAQ, LAA, RST, RTL, LGT, LMS, LGP, RTS, SQP, VLG, SVS, TMQ, SAV, LAG, SGP, TNS, RLT, TTQ, SAA, TSV, RLG, RAS, STQ, CSP, SAG, ALP, VTS, ISP, SVG, LTS, TTT, RSG, TQL, LNP, TVQ, IAS, LAQ, LSR, LSN, TTG, TSN, SMA, TKS, SVA, TQQ, VQQ, RLP, SAM, TAV, TQW, SSR, TQT, VNS, RSA, LMG, RQS, LVG, VTA, RTT, SMG, VMA, TKP, SAQ, NSP, ATP, VAG, RGS, VKP, RMS, NLP, NAL, RTP, RQL, VQG, VTG, VST, NAS, RVE, ATG, AMS, RNS, VMQ, SMQ, LQQ, TMG, LGQ, TSH, AAP, RSQ, TYS, ITP, VAK, TQM, TKA, SQQ, ISG, VSR, RTA, RML, SQM, VAN, CTP, ISS, AGP, TAK, RTG, LHP, TMT, AQP, QAP, RQP, LKS, NTT, TSK, RYS, KSS, NTP, VGG, IAA, LMA, MAP, VHP, VLS, LAN, ATQ, TNA, TAN, VSN, AAA, AVG, LTA, SAN, RAG, RQG, TLR, LSH, SAF, RAA, IQP, ILG, VNG, SVQ, LSK, TNG, RTQ, TMN, RGG, TTR, VRP, VKA, LAR, NQP, TMK, TYA, TQK, TTK, IAG, TQN, LAH, NTQ, RQQ, RAQ, TKQ, TQH, TNQ, LMQ, VNA, VQT, TQR, VGK, VKQ, IQS, LQR, TMM, VGN, RIG, SAK, RIA, VQN, NVQ, RIP, NAQ, NMQ, TPS, LTN, VTK, PGW, LPP, SPP, TPA, or TGC; and/or
   [0246] (v) [N5] is or comprises: VQN, VKN, VQT, VQK, DQN, VQH, GQN, VQI, VHN, FQN, LQN, VLN, VRN, VQS, VQY, AQN, VEN, VQD.
[0247] 73. The isolated AAV particle of any one of embodiments 15, 16, 27-30, 42-47, or 54-58, which comprises:
   [0248] (i) the amino acid sequence of any of SEQ ID NOs: 139-1138;
   [0249] (ii) an amino acid sequence comprising any portion of an amino acid sequence in (i), e.g., any 2, 3, 4, 5, 6, 7, 8, 9, 10, 11, 12, 13, 14, 15, 16, 17, or 18 amino acids, e.g., consecutive amino acids, thereof;
   [0250] (iii) an amino acid sequence comprising at least one, two, or three but no more than four modifications, e.g., substitutions (e.g., conservative substitutions), insertions, or deletions, relative to any of the amino acid sequences in (i); or
   [0251] (iv) an amino acid sequence comprising at least one, two, or three but no more than four different amino acids, relative to any one of the amino acid sequences in (i).
[0252] 74. The isolated AAV particle of any one of embodiments 15-71 or 73, which comprises:
   [0253] (i) the amino acid sequence of any of SEQ ID NOs: 139-476;
   [0254] (ii) an amino acid sequence comprising any portion of an amino acid sequence in (i), e.g., any 2, 3, 4, 5, 6, 7, 8, 9, 10, 11, 12, 13, 14, 15, 16, 17, or 18 amino acids, e.g., consecutive amino acids, thereof;
   [0255] (iii) an amino acid sequence comprising at least one, two, or three but no more than four modifications, e.g., substitutions (e.g., conservative substitutions), insertions, or deletions, relative to any of the amino acid sequences in (i); or
   [0256] (iv) an amino acid sequence comprising at least one, two, or three but no more than four different amino acids, relative to any one of the amino acid sequences in (i).
[0257] 75. An isolated, e.g., recombinant, AAV particle comprising an AAV capsid variant and a nucleic acid comprising a transgene encoding an antibody molecule which binds to tau (e.g., human tau), wherein the AAV capsid variant comprises one, two, three, four, or all of:
   [0258] (i) an [N1], wherein [N1] is or comprises: PLNGA (SEQ ID NO: 3679), SLNGA (SEQ ID NO: 4684), QLNGA (SEQ ID NO: 4685), ALNGA (SEQ ID NO: 4686), PLNGS (SEQ ID NO: 4687), PVNGA (SEQ ID NO: 4688), PLNGG (SEQ ID NO: 4689), PLNGT (SEQ ID NO: 4690), PLDGA (SEQ ID NO: 4691), QLNGS (SEQ ID NO: 4692), PLNGN (SEQ ID NO: 4693), SLDGA (SEQ ID NO: 4694), HLNGA (SEQ ID NO: 4695), ALNGT (SEQ ID NO: 4696), PINGA (SEQ ID NO: 4697), ALDGA (SEQ ID NO: 4698), PLNCA (SEQ ID NO: 4699), PLNGQ (SEQ ID NO: 4700), PLDSA (SEQ ID NO: 4701), RLDGA (SEQ ID NO: 4702), QLNGN (SEQ ID NO: 4703), PLNGY (SEQ ID NO: 4704), or PLDSS (SEQ ID NO: 4705);
   [0259] (ii) an [N2] wherein [N2] is or comprises: VHLY (SEQ ID NO: 4680) or VHVY (SEQ ID NO: 4682);
   [0260] (iii) an [N3] wherein [N3] is or comprises: AQAQ (SEQ ID NO: 4737), SQAQ (SEQ ID NO: 4738), AQPQ (SEQ ID NO: 4739), or AQSQ (SEQ ID NO: 4740);
   [0261] (iv) an [N4] wherein [N4] is or comprises: TGW, TGL, TGS, TGG, TAW, TGR, TAS, LSS, TSS, SSL, SSS, TLS, TVS, VSS, TSP, VSP, TMS, LSP, VAS, TAL, TTS, TLP, VLP, RGW, LSG, LAS, SSP, LLP, STS, TSA, TTP, SAL, LGS, VTP, VSA, IGW, TGF, LTP, TLA, LSA, TVG, TAP, TMP, TSL, VQS, SSM, SLP, VSQ, RSS, TST, VMS, TTA, TQP, LST, LAP, TVA, RLS, TGY, TSG, TAG, VMP, TSQ, TMA, VGS, TSW, TGV, TGT, TLG, LMP, VQP, TGM, SMS, SQL, IGS, RSV, TAA, STP, LSQ, TAQ, TGP, ASP, VSG, SAP, TLQ, LQP, TAT, TGQ, ATS, IGG, VAA, TSM, TVW, TAM, TGA, VAT, QSP, TQA, VQA, RSP, LAT, VAQ, LAA, RST, RTL, LGT, LMS, LGP, RTS, SQP, VLG, SVS, TMQ, SAV, LAG, SGP, TNS, RLT, TTQ, SAA, TSV, RLG, RAS, STQ, CSP, SAG, ALP, VTS, ISP, SVG, LTS, TTT, RSG, TQL, LNP, TVQ, IAS, LAQ, LSR, LSN, TTG, TSN, SMA, TKS, SVA, TQQ, VQQ, RLP, SAM, TAV, TQW, SSR, TQT, VNS, RSA, LMG, RQS, LVG, VTA, RTT, SMG, VMA, TKP, SAQ, NSP, ATP, VAG, RGS, VKP, RMS, NLP, NAL, RTP, RQL, VQG, VTG, VST, NAS, RVE, ATG, AMS, RNS, VMQ, SMQ, LQQ, TMG, LGQ, TSH, AAP, RSQ, TYS, ITP, VAK, TQM, TKA, SQQ, ISG, VSR, RTA, RML, SQM, VAN, CTP, ISS, AGP, TAK, RTG, LHP, TMT, AQP, QAP, RQP, LKS, NTT, TSK, RYS, KSS, NTP, VGG, IAA, LMA, MAP, VHP, VLS, LAN, ATQ, TNA, TAN, VSN, AAA, AVG, LTA, SAN, RAG, RQG, TLR, LSH, SAF, RAA, IQP, ILG, VNG, SVQ, LSK, TNG, RTQ, TMN, RGG, TTR, VRP, VKA, LAR, NQP, TMK, TYA, TQK, TTK, IAG, TQN, LAH, NTQ, RQQ, RAQ, TKQ, TQH, TNQ, LMQ, VNA, VQT, TQR, VGK, VKQ, IQS, LQR, TMM, VGN, RIG, SAK, RIA, VQN, NVQ, RIP, NAQ, NMQ, TPS, LTN, VTK, PGW, LPP, SPP, TPA, or TGC; and/or
   [0262] (v) an [N5] wherein [N5] is or comprises: VQN, VKN, VQT, VQK, DQN, VQH, GQN, VQI, VHN, FQN, LQN, VLN, VRN, VQS, VQY, AQN, VEN, VQD; and/or wherein the AAV capsid variant comprises an amino acid modification, e.g., a conservative substitution, of any of the aforesaid amino acids in (i)-(v).
[0263] 76. The isolated AAV particle of embodiment 72 or 75, wherein the AAV capsid variant comprises:
   [0264] (i) the amino acid sequence of any of SEQ ID NOs: 140, 142-144, 148-150, 154-158, 160, 161, 163, 165, 166, 168, 170, 171, 173-175, 177-179, 181, 182, 184-197, 199-214, 218-222, 224, 225, 227-241, 243-253, 255-262, 265, 267, 268, 270, 271, 273, 274, 276, 277, 279, 282, 284-286, 288-296, 300-310, 312, 315, 317, 318, 320-323, 326, 327, 331, 332, 334, 336, 337, 339, 340, 341, 343, 344, 346, 349, 351, 352, 356-363, 365-367, 369, 370, 372-376, 378-381, 383-389, 392, 393, 395, 397-400, 404, 407, 408, 411, 412, 415, 417, 420-430, 432, 433, 435-438, 441, 442, 446-448, 451-453, 456, 458, 460, 461, 465, 467-469, 471-473, 475, 476, 478, 480, 482, 485, 488, 490, 492, 493, 495, 498, 500-503, 505, 507, 509, 510, 517, 522-526, 528, 535-538, 540, 543-545, 547, 551, 552, 557, 559, 561, 564, 568, 570, 572-574, 577, 585-588, 592-594, 596, 601, 602, 605, 612, 616, 619, 622, 624, 627, 628, 635, 640, 641, 646, 658, 660, 665, 666, 675, 678, 680, 683, 684, 689, 693, 695, 707, 711, 718, 719, 724, 727, 735, 740, 748, 751, 755, 758, 759, 765, 766, 768, 778, 783, 787, 791, 797, 801, 804, 817, 821, 832, 841, 852, 856, 861, 862, 864, 894, 906, 911, 913, 924, 929, 945, 959, 961, 970, 975, 980, 983, 988, 992, 1009, 1015, 1019, 1027, 1032, 1036, 1038, 1047, 1051, 1061, 1077, 1081, 1095, or 1113;
   [0265] (ii) an amino acid sequence comprising any portion of an amino acid sequence in (i), e.g., any 2, 3, 4, 5, 6, 7, 8, 9, 10, 11, 12, 13, 14, 15, 16, 17, or 18 amino acids, e.g., consecutive amino acids, thereof;
   [0266] (iii) an amino acid sequence comprising at least one, two, or three but no more than four modifications, e.g., substitutions (e.g., conservative substitutions), insertions, or deletions, relative to any of the amino acid sequences in (i); or
   [0267] (iv) an amino acid sequence comprising at least one, two, or three but no more than four different amino acids, relative to any one of the amino acid sequences in (i).
[0268] 77. The isolated AAV particle of any one of embodiments 16 or 58-75, wherein [N1]-[N2]-[N3]-[N4]-[N5] is or comprises the amino acid sequence of PLNGAVHLYAQAQTGWVPN (SEQ ID NO: 314).
[0269] 78. The isolated AAV particle of any one of embodiments 16 or 58-75, wherein [N1]-[N2]-[N3]-[N4]-[N5] is or comprises the amino acid sequence of PLNGAVHLYAQAQLSPVKN (SEQ ID NO: 566).
[0270] 79. The isolated AAV particle of any one of embodiments 16 or 58-76, wherein [N1]-[N2]-[N3]-[N4]-[N5] is or comprises the amino acid sequence of PLNGAVHLYAQAQTGWVQN (SEQ ID NO: 476).
[0271] 80. The isolated AAV particle of any one of embodiments 16 or 58-75, wherein [N1]-[N2]-[N3]-[N4]-[N5] is or comprises the amino acid sequence of:
   [0272] (i) the amino acid sequence of any of SEQ ID NOs: 1200-1203, 40-136, 314, 325, 491, 499, 529, 558, 566, 576, 603, 610, 625, 631, 648, 649, 700, 703, 720, 755, 763, 765, 771, 791, 804, 816, 818, 819, 828, 859, 864, 871, 885, 946, 960, 966, 978, 979, 1016, 1033, 1032, 1037, 1058, 1081, 1100, 1122, or 1204-1223;
   [0273] (ii) an amino acid sequence comprising any portion of an amino acid sequence in (i), e.g., any 2, 3, 4, 5, 6, 7, 8, 9, 10, 11, 12, 13, 14, 15, 16, 17, or 18 amino acids, e.g., consecutive amino acids, thereof;
   [0274] (iii) an amino acid sequence comprising at least one, two, or three but no more than four modifications, e.g., substitutions (e.g., conservative substitutions), insertions, or deletions, relative to any of the amino acid sequences in (i); or
   [0275] (iv) an amino acid sequence comprising at least one, two, or three but no more than four different amino acids, relative to any one of the amino acid sequences in (i).
[0276] 81. The isolated AAV particle of any one of embodiments 15-80, wherein [N1]-[N2] is present in loop VIII.
[0277] 82. The isolated AAV particle of any one of embodiments 16 or 58-81, wherein [N3], [N4], and/or [N5] is present in loop VIII.
[0278] 83. The isolated AAV particle of any one of embodiments 15-82, wherein [N1]-[N2]-[N3]-[N4]-[N5] is present in loop VIII.
[0279] 84. The isolated AAV particle of any one of embodiments 15-83, wherein the AAV capsid variant comprises an amino acid other than A at position 587 and/or an amino acid other than Q at position 588, numbered according to SEQ ID NO: 138.
[0280] 85. The isolated AAV particle of any one of embodiments 15-84, which comprises:
   [0281] (i) the amino acid P, Q, A, H, K, L, R, S, or T (e.g., P, Q, A, S, or T) at position 587, numbered according to SEQ ID NO: 138 or 3636; and/or
   [0282] (ii) the amino acid L, I, V, H, or R (e.g., L or I) at position 588, numbered according to SEQ ID NO: 5, 8, 138 or 3636.
[0283] 86. The isolated AAV particle of any one of embodiments 15-85, wherein [N1] is present immediately subsequent to position 586, relative to a reference sequence numbered according to the amino acid sequence of SEQ ID NO: 5, 8, 138, or 3636.
[0284] 87. The isolated AAV particle of any one of embodiments 15-86, wherein [N1] is present immediately subsequent to position 586, and replaces positions 587 and 588 (e.g., A587 and Q588), numbered according to the amino acid sequence of SEQ ID NO: 138.
[0285] 88. The isolated AAV particle of any one of embodiments 15-87, wherein [N1] replaces positions 587 and 588 (e.g., A587 and Q588), numbered according to the amino acid sequence of SEQ ID NO: 138.
[0286] 89. The isolated AAV particle of any one of embodiments 15-88, wherein [N1] corresponds to positions 587-591 of SEQ ID NO: 5, 8, or 3636.
[0287] 90. The isolated AAV particle of any one of embodiments 16 or 58-89, wherein [N1]-[N2]-[N3]-[N4]-[N5] is present immediately subsequent to position 586, numbered according to the amino acid sequence of SEQ ID NO: 5, 8, 138, or 3636.
[0288] 91. The isolated AAV particle of any one of embodiments 15-90, wherein [N2] is present immediately subsequent to [N1].
[0289] 92. The isolated AAV particle of any one of embodiments 15-91, wherein [N2] is present immediately subsequent to [N1], wherein [N1] is present immediately subsequent to position 586, relative to a reference sequence numbered according to the amino acid sequence of SEQ ID NO: 5, 8, 138, or 3636.
[0290] 93. The isolated AAV particle of any one of embodiments 15-92, wherein [N2] is present immediately subsequent to [N1], wherein [N1] is present immediately subsequent to position 586, relative to a reference sequence numbered according to the amino acid sequence of SEQ ID NO: 5, 8, 138, or 3636.
[0291] 94. The isolated AAV particle of any one of embodiments 15-93, wherein [N2] is present immediately subsequent to [N1], wherein [N1] is present immediately subsequent to position 586 and replaces positions 587 and 588 (e.g., A587 and Q588), numbered according to SEQ ID NO: 138.
[0292] 95. The isolated AAV particle of any one of embodiments 15-94, wherein [N2] corresponds to positions 592-595 of SEQ ID NO: 5, 8, or 3636.
[0293] 96. The isolated AAV particle of any one of embodiments 15-95, wherein [N1]-[N2] replaces positions 587 and 588 (e.g., A587 and Q588), numbered according to SEQ ID NO: 138.
[0294] 97. The isolated AAV particle of any one of embodiments 15-96, wherein [N1]-[N2] is present immediately subsequent to position 586, numbered according to SEQ ID NO: 138.
[0295] 98. The isolated AAV particle of any one of embodiments 15-97, wherein [N1]-[N2] is present immediately subsequent to position 586 and replaces positions 587 and 588 (e.g., A587 and Q588), numbered according to SEQ ID NO: 138.
[0296] 99. The isolated AAV particle of any one of embodiments 15-98, wherein [N1]-[N2] corresponds to positions 587-595 of SEQ ID NO: 5, 8, or 3636.
[0297] 100. The isolated AAV particle of any one of embodiments 16 or 35-99, wherein [N3] is present immediately subsequent to position 588, relative to a reference sequence numbered according to the amino acid sequence of SEQ ID NO: 138.
[0298] 101. The isolated AAV particle of any one of embodiments 16 or 35-100, wherein [N3] replaces positions 589-592 (e.g., A589, Q590, A591, Q592), numbered according to the amino acid sequence of SEQ ID NO: 138.
[0299] 102. The isolated AAV particle of any one of embodiments 16 or 35-101, wherein [N3] is present immediately subsequent to position 588, and replaces positions 589-592 (e.g., A589, Q590, A591, Q592), numbered according to the amino acid sequence of SEQ ID NO: 138.
[0300] 103. The isolated AAV particle of any one of embodiments 16 or 35-102, wherein [N3] corresponds to positions 596-599 of SEQ ID NO: 5, 8, or 3636.
[0301] 104. The isolated AAV particle of any one of embodiments 16 or 35-103, wherein [N1]-[N2]-[N3] is present immediately subsequent to position 586, numbered according to SEQ ID NO: 138.
[0302] 105. The isolated AAV particle of any one of embodiments 16 or 35-104, wherein [N1]-[N2]-[N3] replaces positions 587-592 (e.g., A587, Q588, A589, Q590, A591, Q592), numbered according to SEQ ID NO: 138.
[0303] 106. The isolated AAV particle of any one of embodiments 16 or 35-105, wherein [N1]-[N2]-[N3] is present immediately subsequent to position 586 and replaces positions 587-592 (e.g., A587, Q588, A589, Q590, A591, Q592), numbered according to SEQ ID NO: 138.
[0304] 107. The isolated AAV particle of any one of embodiments 16 or 35-106, wherein [N1]-[N2]-[N3] corresponds to positions 587-599 of SEQ ID NO: 5, 8, or 3636.
[0305] 108. The isolated AAV particle of any one of embodiments 16 or 47-107, wherein [N4] is present immediately subsequent to position 592, relative to a reference sequence numbered according to the amino acid sequence of SEQ ID NO: 138.
[0306] 109. The isolated AAV particle of any one of embodiments 16 or 47-108, wherein [N4] replaces positions 593-595 (e.g., T593, G594, W595), numbered according to the amino acid sequence of SEQ ID NO: 138.
[0307] 110. The isolated AAV particle of any one of embodiments 16 or 47-109, wherein [N4] is present immediately subsequent to position 592, and replaces positions 593-595 (e.g., T593, G594, W595), numbered according to the amino acid sequence of SEQ ID NO: 138.
[0308] 111. The isolated AAV particle of any one of embodiments 16 or 47-110, wherein [N4] corresponds to positions 600-602 of SEQ ID NO: 5, 8, or 3636.
[0309] 112. The isolated AAV particle of any one of embodiments 16 or 47-111, wherein [N3]-[N4] is present immediately subsequent to position 588, numbered according to SEQ ID NO: 138.
[0310] 113. The isolated AAV particle of any one of embodiments 16 or 47-112, wherein [N3]-[N4] replaces positions 589-595 (e.g., A589, Q590, A591, Q592, T593, G594, W595), numbered according to the amino acid sequence of SEQ ID NO: 138.
[0311] 114. The isolated AAV particle of any one of embodiments 16 or 47-113, wherein [N3]-[N4] is present immediately subsequent to 588, and replaces positions 589-595 (e.g., A589, Q590, A591, Q592, T593, G594, W595), numbered according to the amino acid sequence of SEQ ID NO: 138.
[0312] 115. The isolated AAV particle of any one of embodiments 16 or 47-114, wherein [N3]-[N4] corresponds to positions 596-602 of SEQ ID NO: 5, 8, or 3636.
[0313] 116. The isolated AAV particle of any one of embodiments 16 or 47-115, wherein [N1]-[N2]-[N3]-[N4] is present immediately subsequent to position 586, numbered according to SEQ ID NO: 138.
[0314] 117. The isolated AAV particle of any one of embodiments 16 or 47-116, wherein [N1]-[N2]-[N3]-[N4] replaces positions 587-595 (e.g., A587, Q588, A589, Q590, A591, Q592, T593, G594, W595), numbered according to SEQ ID NO: 138.
[0315] 118. The isolated AAV particle of any one of embodiments 16 or 47-117, wherein [N1]-[N2]-[N3]-[N4] is present immediately subsequent to position 586 and replaces positions 587-595 (e.g., A587, Q588, A589, Q590, A591, Q592, T593, G594, W595), numbered according to SEQ ID NO: 138.
[0316] 119. The isolated AAV particle of any one of embodiments 16 or 47-118, wherein [N1]-[N2]-[N3]-[N4] corresponds to positions 587-602 of SEQ ID NO: 5, 8, or 3636.
[0317] 120. The isolated AAV particle of any one of embodiments 16 or 58-119, wherein [N5] is present immediately subsequent to position 595, relative to a reference sequence numbered according to the amino acid sequence of SEQ ID NO: 138.
[0318] 121. The isolated AAV particle of any one of embodiments 16 or 58-120, wherein [N5] replaces positions 596-598 (e.g., V596, Q597, N598), numbered according to the amino acid sequence of SEQ ID NO: 138.
[0319] 122. The isolated AAV particle of any one of embodiments 16 or 63-121, wherein [N5] is present immediately subsequent to position 595, and replaces positions 596-598 (e.g., V596, Q597, N598), numbered according to the amino acid sequence of SEQ ID NO: 138.
[0320] 123. The isolated AAV particle of any one of embodiments 16 or 63-122, wherein [N5] corresponds to positions 603-605 of SEQ ID NO: 5, 8, or 3636.
[0321] 124. The isolated AAV particle of any one of embodiments 16 or 63-123, wherein [N4]-[N5] corresponds to positions 600-605 of SEQ ID NO: 5, 8, or 3636.
[0322] 125. The isolated AAV particle of any one of embodiments 16 or 63-124, wherein [N1]-[N2]-[N3]-[N4]-[N5] replaces positions 587-598 (e.g., A587, Q588, A589, Q590, A591, Q592, T593, G594, W595, V596, Q597, N598), numbered according to SEQ ID NO: 138.
[0323] 126. The isolated AAV particle of any one of embodiments 16 or 63-125, wherein [N1]-[N2]-[N3]-[N4]-[N5] is present immediately subsequent to position 586 and replaces positions 587-598 (e.g., A587, Q588, A589, Q590, A591, Q592, T593, G594, W595, V596, Q597, N598), numbered according to SEQ ID NO: 138.
[0324] 127. The isolated AAV particle of any one of embodiments 16 or 63-126, wherein [N1]-[N2]-[N3]-[N4]-[N5] corresponds to positions 587-605 of SEQ ID NO: 5, 8, or 3636.
[0325] 128. The isolated AAV particle of any one of embodiments 15-127, wherein the AAV capsid variant comprises from N-terminus to C-terminus, [N1]-[N2].
[0326] 129. The isolated AAV particle of any one of embodiments 16 or 30-128, wherein the AAV capsid variant comprises from N-terminus to C-terminus, [N1]-[N2]-[N3].
[0327] 130. The isolated AAV particle of any one of embodiments 16 or 47-129, wherein the AAV capsid variant comprises from N-terminus to C-terminus, [N1]-[N2]-[N3]-[N4].
[0328] 131. The isolated AAV particle of any one of embodiments 16 or 58-130, wherein the AAV capsid variant comprises from N-terminus to C-terminus, [N1]-[N2]-[N3]-[N4]-[N5].
[0329] 132. An isolated, e.g., recombinant, AAV particle comprising an AAV capsid variant and a nucleic acid comprising a transgene encoding an antibody molecule which binds to tau (e.g., human tau), wherein the AAV capsid variant comprises [A][B], wherein [A] comprises the amino acid sequence of PLNGA (SEQ ID NO: 3679), and [B] comprises X1, X2, X3, X4, wherein:
   [0330] (i) X1 is: V, I, L, A, F, D, or G;
   [0331] (ii) X2 is: H, N, Q, P, D, L, R, or Y;
   [0332] (iii) X3 is: L, H, I, R, or V; and
   [0333] (iv) X4 is Y; and/or
   [0334] wherein the AAV capsid variant comprises an amino acid modification, e.g., a conservative substitution, of any of the aforesaid amino acids in (i)-(iv);
   [0335] optionally wherein the AAV capsid variant further comprises:
   [0336] (i) one, two, or all of an amino acid other than T at position 593 (e.g., a V, S, L, R, I, A, N, C, Q, M, P, or K), an amino acid other than G at position 594 (e.g., T, M, A, K, S, Q, V, I, R, N, P, L, H, or Y), and/or an amino acid other than W at position 595 (e.g., K, Q, S, P, C, A, G, N, T, R, V, M, H, L, E, F, or Y), relative to a reference sequence numbered according to the amino acid sequence of SEQ ID NO: 138; and/or
   [0337] (ii) one, two, or all of an amino acid other than V at position 596 (e.g., a D, F, A, E, L, G, or I), an amino acid other than Q at position 597 (e.g., P, K, R, L, H, or E), and/or an amino acid other than N at position 598 (e.g., H, S, T, P, K, I, D, or Y), relative to a reference sequence numbered according to the amino acid sequence of SEQ ID NO: 138.
[0338] 133. The isolated AAV particle of embodiment 132, wherein:
   [0339] (i) X1 is V;
   [0340] (ii) X2 is H;
   [0341] (iii) X3 is L, H, or I; and
   [0342] (iv) X4 is Y.
[0343] 134. The isolated AAV particle of embodiment 132 or 133, wherein [B] comprises:
   [0344] (i) VH, VN, VQ, IH, LH, VP, VD, AH, FH, DH, VL, GH, VR, VY, LY, HY, IY, RY, HL, HH, HI, NL, QL, PL, DL, HR, LL, RL, HV, or YL; or
   [0345] (ii) VH, LY, HY, IY, HL, HH, or HI.
[0346] 135. The isolated AAV particle of any one of embodiments 132-134, wherein [B] comprises:
   [0347] (i) VHL, VHH, VHI, VNL, VQL, IHL, LHL, VPL, VDL, AHL, VHR, FHL, DHL, VLL, GHL, VRL, VHV, VYL, HLY, HHY, HIY, NLY, QLY, PLY, DLY, HRY, LLY, RLY, HVY, YLY;
   [0348] (ii) VHL, VHH, VHI, HLY, HHY, or HIY.
[0349] 136. The isolated AAV particle of any one of embodiments 132-135, wherein [B] is:

(i)
(SEQ ID NO: 4680)
VHLY,
(SEQ ID NO: 4683)
VHHY,
(SEQ ID NO: 4681)
VHIY,
(SEQ ID NO: 4724)
VNLY,
(SEQ ID NO: 4729)
VQLY,
(SEQ ID NO: 4730)
IHLY,
(SEQ ID NO: 4727)
LHLY,
(SEQ ID NO: 4723)
VPLY,
(SEQ ID NO: 4731)
VDLY,
(SEQ ID NO: 4732)
AHLY,
(SEQ ID NO: 4725)
VHRY,
(SEQ ID NO: 4726)
FHLY,
(SEQ ID NO: 4728)
DHLY,
(SEQ ID NO: 4733)
VLLY,
(SEQ ID NO: 4734)
GHLY,
(SEQ ID NO: 4735)
VRLY,
(SEQ ID NO: 4682)
VHVY,
or
(SEQ ID NO: 4736)
VYLY;
or
(ii)
(SEQ ID NO: 4680)
VHLY,
(SEQ ID NO: 4683)
VHHY,
or
(SEQ ID NO: 4681)
VHIY.

[0350] 137. The isolated AAV particle of any one of embodiments 132-136, wherein [B] is or comprises VHLY (SEQ ID NO: 4680).
[0351] 138. The isolated AAV particle of any one of embodiments 132-137, wherein [A][B] comprises:

(i)
(SEQ ID NO: 3681)
PLNGAVH,
(SEQ ID NO: 5110)
PLNGAVN,
(SEQ ID NO: 5111)
PLNGAVQ,
(SEQ ID NO: 5112)
PLNGAIH,
(SEQ ID NO: 5113)
PLNGALH,
(SEQ ID NO: 5114)
PLNGAVP,
(SEQ ID NO: 5115)
PLNGAVD,
(SEQ ID NO: 5116)
PLNGAAH,
(SEQ ID NO: 5117)
PLNGAFH,
(SEQ ID NO: 5118)
PLNGADH,
(SEQ ID NO: 5119)
PLNGAVL,
(SEQ ID NO: 5120)
PLNGAGH,
(SEQ ID NO: 5121)
PLNGAVR,
or
(SEQ ID NO: 5122)
PLNGAVY;
or
(ii)
(SEQ ID NO: 3681)
PLNGAVH;

[0352] (iii) amino acid sequence comprising any portion of an amino acid sequence in (i) or (ii), e.g., any 2, 3, 4, 5, or 6 amino acids, e.g., consecutive amino acids, thereof;
[0353] (iv) an amino acid sequence comprising at least one, two, or three but no more than four modifications, e.g., substitutions (e.g., conservative substitutions), insertions, or deletions, relative to any of the amino acid sequences in (i) or (ii); or
[0354] (v) an amino acid sequence comprising at least one, two, or three but no more than four different amino acids, relative to any one of the amino acid sequences in (i) or (ii).
[0355] 139. The isolated AAV particle of any one of embodiments 132-138, wherein [A][B] is or comprises:

(i)
(SEQ ID NO: 3648)
PLNGAVHLY,
(SEQ ID NO: 4796)
PLNGAVHHY,
(SEQ ID NO: 4794)
PLNGAVHIY,
(SEQ ID NO: 5123)
PLNGAVNLY,
(SEQ ID NO: 5124)
PLNGAVQLY,
(SEQ ID NO: 5125)
PLNGAIHLY,
(SEQ ID NO: 5126)
PLNGALHLY,
(SEQ ID NO: 5127)
PLNGAVPLY,
(SEQ ID NO: 5128)
PLNGAVDLY,
(SEQ ID NO: 5129)
PLNGAAHLY,
(SEQ ID NO: 5130)
PLNGAVHRY,
(SEQ ID NO: 5131)
PLNGAFHLY,
(SEQ ID NO: 5132)
PLNGADHLY,
(SEQ ID NO: 5133)
PLNGAVLLY,
(SEQ ID NO: 5134)
PLNGAGHLY,
(SEQ ID NO: 5135)
PLNGAVRLY,
(SEQ ID NO: 5136)
PLNGAVHVY,
or
(SEQ ID NO: 5137)
PLNGAVYLY;
(ii)
(SEQ ID NO: 3648)
PLNGAVHLY,
(SEQ ID NO: 4796)
PLNGAVHHY,
or
(SEQ ID NO: 4794)
PLNGAVHIY;

[0356] (iii) amino acid sequence comprising any portion of an amino acid sequence in (i) or (ii), e.g., any 2, 3, 4, 5, 6, 7, or 8 amino acids, e.g., consecutive amino acids, thereof;
[0357] (iv) an amino acid sequence comprising at least one, two, or three but no more than four modifications, e.g., substitutions (e.g., conservative substitutions), insertions, or deletions, relative to any of the amino acid sequences in (i) or (ii); or
[0358] (v) an amino acid sequence comprising at least one, two, or three but no more than four different amino acids, relative to any one of the amino acid sequences in (i) or (ii).
[0359] 140. The isolated AAV particle of any one of embodiments 132-139, wherein [A][B] is or comprises PLNGAVHLY (SEQ ID NO: 3648).
[0360] 141. The isolated AAV particle of any one of embodiments 132-140, wherein the AAV capsid variant further comprises one, two, three, or all of an amino acid other than A at position 589 (e.g., D, S, or T), an amino acid other than Q at position 590 (e.g., K, H, L, P, or R), an amino acid other than A at position 591 (e.g., P or E), and/or an amino acid other than Q at position 592 (e.g., H, K, or P).
[0361] 142. The isolated AAV particle of any one of embodiments 132-141, which further comprises one, two, three, or all of an amino acid other than A at position 596 (e.g., D, S, or T), an amino acid other than Q at position 597 (e.g., K, H, L, P, or R), an amino acid other than A at position 598 (e.g., P or E), and/or an amino acid other than Q at position 599 (e.g., H, K, or P), relative to a reference sequence numbered according to the amino acid sequence of SEQ ID NO: 5, 8, or 3636.
[0362] 143. The isolated AAV particle of any one of embodiments 132-142, which further comprises:
   [0363] (i) A at position 589, Q at position 590, A at position 591, and/or Q at position 592, numbered according to the amino acid sequence of SEQ ID NO: 138; or
   [0364] (ii) A at position 596, Q at position 597, A at position 598, and/or Q at position 599, numbered according to the amino acid sequence of SEQ ID NO: 5, 8, or 3636.
[0365] 144. The isolated AAV particle of any one of embodiments 132-143, wherein the AAV capsid variant further comprises [C], wherein [C] comprises X4, X5, X6, and X7, wherein:
   [0366] (a) position X4 is: A, D, S, or T;
   [0367] (b) position X5 is: Q, K, H, L, P, or R;
   [0368] (c) position X6 is: A, P, or E; and
   [0369] (d) position X7 is: Q, H, K, or P; and/or an amino acid modification, e.g., a conservative substitution, of any of the aforesaid amino acids in (a)-(d).
[0370] 145. The isolated AAV particle of embodiment 144, wherein:
   [0371] (a) position X4 is: A, D, or S;
   [0372] (b) position X5 is Q or K;
   [0373] (c) position X6 is A or P; and/or
   [0374] (d) position X7 is Q.
[0375] 146. The isolated AAV particle of embodiment 144 or 145, wherein [C] comprises:
   [0376] (i) AQ, AK, DQ, SQ, AH, AL, AP, AR, TQ, PQ, EQ, QA, QP, KA, HA, QE, LA, PA, or RA; or
   [0377] (ii) AQ, AK, DQ, SQ, PQ, QA, QP, or KA.
[0378] 147. The isolated AAV particle of any one of embodiments 144-146, wherein [C] comprises:
   [0379] (i) AQA, AQP, AKA, DQA, SQA, AHA, AQE, ALA, APA, ARA, TQA, QAQ, QPQ, KAQ, HAQ, QEQ, QAK, LAQ, PAQ, RAQ, QAH, or QAP; or
   [0380] (ii) AQA, AQP, AKA, DQA, SQA, QAQ, QPQ, or KAQ.
[0381] 148. The isolated AAV article of an one of embodiments 144-147, wherein [C] is or comprises:

(i)
(SEQ ID NO: 4737)
AQAQ,
(SEQ ID NO: 4739)
AQPQ,
(SEQ ID NO: 4741)
AKAQ,
(SEQ ID NO: 4744)
DQAQ,
(SEQ ID NO: 4738)
SQAQ,
(SEQ ID NO: 4742)
AHAQ,
(SEQ ID NO: 4748)
AQEQ,
(SEQ ID NO: 4746)
AQAK,
(SEQ ID NO: 4749)
ALAQ,
(SEQ ID NO: 4745)
APAQ,
(SEQ ID NO: 4750)
ARAQ,
(SEQ ID NO: 4747)
AQAH,
(SEQ ID NO: 4743)
AQAP,
or
(SEQ ID NO: 4751)
TQAQ;
or
(ii)
(SEQ ID NO: 4737)
AQAQ,
(SEQ ID NO: 4739)
AQPQ,
(SEQ ID NO: 4741)
AKAQ,
(SEQ ID NO: 4744)
DQAQ,
or
(SEQ ID NO: 4738)
SQAQ.

[0382] 149. The isolated AAV particle of any one of embodiments 144-148, wherein [C] is or comprises AQAQ (SEQ ID NO: 4737).
[0383] 150. The isolated AAV particle of any one of embodiments 144-149, wherein [B][C] is or comprises:

(i)
(SEQ ID NO: 4797)
VHLYAQAQ,
(SEQ ID NO: 4804)
VHHYAQAQ,
(SEQ ID NO: 4798)
VHLYAQPQ,
(SEQ ID NO: 4800)
VHLYAKAQ,
(SEQ ID NO: 4801)
VHLYDQAQ,
(SEQ ID NO: 4799)
VHLYSQAQ,
(SEQ ID NO: 4802)
VHIYAQAQ,
(SEQ ID NO: 5138)
VHLYAHAQ,
(SEQ ID NO: 5139)
VNLYAQAQ,
(SEQ ID NO: 5140)
VQLYAQAQ,
(SEQ ID NO: 5141)
VHLYAQEQ,
(SEQ ID NO: 5142)
IHLYAQAQ,
(SEQ ID NO: 5143)
LHLYAQAQ,
(SEQ ID NO: 5144)
VPLYAQAQ,
(SEQ ID NO: 5145)
VHLYAQAK,
(SEQ ID NO: 5146)
VDLYAQAQ,
(SEQ ID NO: 5147)
AHLYAQAQ,
(SEQ ID NO: 5148)
VHRYAQAQ,
(SEQ ID NO: 5149)
FHLYAQAQ,
(SEQ ID NO: 5150)
VHLYALAQ,
(SEQ ID NO: 5151)
DHLYAQAQ,
(SEQ ID NO: 5152)
VHLYAPAQ,
(SEQ ID NO: 5153)
VHLYARAQ,
(SEQ ID NO: 5154)
VHLYAQAH,
(SEQ ID NO: 5155)
VLLYAQAQ,
(SEQ ID NO: 5156)
VHLYAQAP,
(SEQ ID NO: 5157)
GHLYAQAQ,
(SEQ ID NO: 5158)
VRLYAQAQ,
(SEQ ID NO: 4803)
VHVYAQAQ,
(SEQ ID NO: 5159)
VYLYAQAQ,
or
(SEQ ID NO: 5160)
VHLYTQAQ;
(ii)
(SEQ ID NO: 4797)
VHLYAQAQ,
(SEQ ID NO: 4804)
VHHYAQAQ,
(SEQ ID NO: 4798)
VHLYAQPQ,
(SEQ ID NO: 4800)
VHLYAKAQ,
(SEQ ID NO: 4801)
VHLYDQAQ,
(SEQ ID NO: 4799)
VHLYSQAQ,
or
(SEQ ID NO: 4802)
VHIYAQAQ;

[0384] (iii) amino acid sequence comprising any portion of an amino acid sequence in (i) or (ii), e.g., any 2, 3, 4, 5, 6, or 7 amino acids, e.g., consecutive amino acids, thereof;
[0385] (iv) an amino acid sequence comprising at least one, two, or three but no more than four modifications, e.g., substitutions (e.g., conservative substitutions), insertions, or deletions, relative to any of the amino acid sequences in (i) or (ii); or
[0386] (v) an amino acid sequence comprising at least one, two, or three but no more than four different amino acids, relative to any one of the amino acid sequences in (i) or (ii).
[0387] 151. The isolated AAV particle of any one of embodiments 144-150, wherein [B][C] is or comprises VHLYAQAQ (SEQ ID NO: 4797).
[0388] 152. The isolated AAV particle of any one of embodiments 144-151, wherein [A][B][C] comprises:

(i)
(SEQ ID NO: 4813)
PLNGAVHLYAQ,
(SEQ ID NO: 4826)
PLNGAVHHYAQ,
(SEQ ID NO: 4812)
PLNGAVHLYAK,
(SEQ ID NO: 4814)
PLNGAVHLYDQ,
(SEQ ID NO: 4815)
PLNGAVHLYSQ,
(SEQ ID NO: 4824)
PLNGAVHIYAQ,
(SEQ ID NO: 5161)
PLNGAVHLYAH,
(SEQ ID NO: 5162)
PLNGAVNLYAQ,
(SEQ ID NO: 5163)
PLNGAVQLYAQ,
(SEQ ID NO: 5164)
PLNGAIHLYAQ,
(SEQ ID NO: 5165)
PLNGALHLYAQ,
(SEQ ID NO: 5166)
PLNGAVPLYAQ,
(SEQ ID NO: 5167)
PLNGAVDLYAQ,
(SEQ ID NO: 5168)
PLNGAAHLYAQ,
(SEQ ID NO: 5169)
PLNGAVHRYAQ,
(SEQ ID NO: 5170)
PLNGAFHLYAQ,
(SEQ ID NO: 5171)
PLNGAVHLYAL,
(SEQ ID NO: 5172)
PLNGADHLYAQ,
(SEQ ID NO: 5173)
PLNGAVHLYAP,
(SEQ ID NO: 5174)
PLNGAVHLYAR,
(SEQ ID NO: 5175)
PLNGAVLLYAQ,
(SEQ ID NO: 5176)
PLNGAGHLYAQ,
(SEQ ID NO: 5177)
PLNGAVRLYAQ,
(SEQ ID NO: 5178)
PLNGAVHVYAQ,
(SEQ ID NO: 5179)
PLNGAVYLYAQ,
(SEQ ID NO: 5180)
PLNGAVHLYTQ;
(ii)
(SEQ ID NO: 4813)
PLNGAVHLYAQ,
(SEQ ID NO: 4826)
PLNGAVHHYAQ,
(SEQ ID NO: 4812)
PLNGAVHLYAK,
(SEQ ID NO: 4814)
PLNGAVHLYDQ,
(SEQ ID NO: 4815)
PLNGAVHLYSQ,
(SEQ ID NO: 4824)
PLNGAVHIYAQ;

[0389] (iii) amino acid sequence comprising any portion of an amino acid sequence in (i) or (ii), e.g., any 2, 3, 4, 5, 6, 7, 8, 9, or 10 amino acids, e.g., consecutive amino acids, thereof;
[0390] (iv) an amino acid sequence comprising at least one, two, or three but no more than four modifications, e.g., substitutions (e.g., conservative substitutions), insertions, or deletions, relative to any of the amino acid sequences in (i) or (ii); or
[0391] (v) an amino acid sequence comprising at least one, two, or three but no more than four different amino acids, relative to any one of the amino acid sequences in (i) or (ii).
[0392] 153. The isolated AAV particle of any one of embodiments 144-152, wherein [A][B][C] is or comprises:

(i)
(SEQ ID NO: 4836)
PLNGAVHLYAQAQ,
(SEQ ID NO: 4850)
PLNGAVHHYAQAQ,
(SEQ ID NO: 4837)
PLNGAVHLYAQPQ,
(SEQ ID NO: 4835)
PLNGAVHLYAKAQ,
(SEQ ID NO: 4838)
PLNGAVHLYDQAQ,
(SEQ ID NO: 4839)
PLNGAVHLYSQAQ,
(SEQ ID NO: 4848)
PLNGAVHIYAQAQ,
(SEQ ID NO: 5181)
PLNGAVHLYAHAQ,
(SEQ ID NO: 5182)
PLNGAVNLYAQAQ,
(SEQ ID NO: 5183)
PLNGAVQLYAQAQ,
(SEQ ID NO: 5184)
PLNGAVHLYAQEQ,
(SEQ ID NO: 5185)
PLNGAIHLYAQAQ,
(SEQ ID NO: 5186)
PLNGALHLYAQAQ,
(SEQ ID NO: 5187)
PLNGAVPLYAQAQ,
(SEQ ID NO: 5188)
PLNGAVHLYAQAK,
(SEQ ID NO: 5189)
PLNGAVDLYAQAQ,
(SEQ ID NO: 5190)
PLNGAAHLYAQAQ,
(SEQ ID NO: 5191)
PLNGAVHRYAQAQ,
(SEQ ID NO: 5192)
PLNGAFHLYAQAQ,
(SEQ ID NO: 5193)
PLNGAVHLYALAQ,
(SEQ ID NO: 5194)
PLNGADHLYAQAQ,
(SEQ ID NO: 5195)
PLNGAVHLYAPAQ,
(SEQ ID NO: 5196)
PLNGAVHLYARAQ,
(SEQ ID NO: 5197)
PLNGAVHLYAQAH,
(SEQ ID NO: 5198)
PLNGAVLLYAQAQ,
(SEQ ID NO: 5199)
PLNGAVHLYAQAP,
(SEQ ID NO: 5200)
PLNGAGHLYAQAQ,
(SEQ ID NO: 5201)
PLNGAVRLYAQAQ,
(SEQ ID NO: 5202)
PLNGAVHVYAQAQ,
(SEQ ID NO: 5203)
PLNGAVYLYAQAQ,
(SEQ ID NO: 5204)
PLNGAVHLYTQAQ;
(ii)
(SEQ ID NO: 4836)
PLNGAVHLYAQAQ,
(SEQ ID NO: 4850)
PLNGAVHHYAQAQ,
(SEQ ID NO: 4837)
PLNGAVHLYAQPQ,
(SEQ ID NO: 4835)
PLNGAVHLYAKAQ,
(SEQ ID NO: 4838)
PLNGAVHLYDQAQ,
(SEQ ID NO: 4839)
PLNGAVHLYSQAQ,
(SEQ ID NO: 4848)
PLNGAVHIYAQAQ;

[0393] (iii) amino acid sequence comprising any portion of an amino acid sequence in (i) or (ii), e.g., any 2, 3, 4, 5, 6, 7, 8, 9, 10, 11, or 12 amino acids, e.g., consecutive amino acids, thereof;
[0394] (iv) an amino acid sequence comprising at least one, two, or three but no more than four modifications, e.g., substitutions (e.g., conservative substitutions), insertions, or deletions, relative to any of the amino acid sequences in (i) or (ii); or
[0395] (v) an amino acid sequence comprising at least one, two, or three but no more than four different amino acids, relative to any one of the amino acid sequences in (i) or (ii).
[0396] 154. The isolated AAV particle of any one of embodiments 144-153, wherein [A][B][C] is or comprises PLNGAVHLYAQAQ (SEQ ID NO: 4836).
[0397] 155. The isolated AAV particle of any one of embodiment 132-154, wherein the AAV capsid variant further comprises one, two, or all of an amino acid other than T at position 593 (e.g., a V, S, L, R, I, A, N, C, Q, M, P, or K), an amino acid other than G at position 594 (e.g., T, M, A, K, S, Q, V, I, R, N, P, L, H, or Y), and/or an amino acid other than W at position 595 (e.g., K, Q, S, P, C, A, G, N, T, R, V, M, H, L, E, F, or Y), relative to a reference sequence numbered according to the amino acid sequence of SEQ ID NO: 138
[0398] 156. The isolated AAV particle of any one of embodiment 132-155, which further comprises one, two, or all of an amino acid other than T at position 600 (e.g., a V, S, L, R, I, A, N, C, Q, M, P, or K), an amino acid other than G at position 601 (e.g., T, M, A, K, S, Q, V, I, R, N, P, L, H, or Y), and/or an amino acid other than W at position 602 (e.g., K, Q, S, P, C, A, G, N, T, R, V, M, H, L, E, F, or Y), relative to a reference sequence numbered according to the amino acid sequence of SEQ ID NO: 5, 8, 3636.
[0399] 157. The isolated AAV particle of any one of embodiment 132-156, which further comprises one, two, three or all of:
   [0400] (i) the amino acid V, S, L, R, I, A, N, C, Q, M, P, or K (e.g., L) at position 593 numbered according to SEQ ID NO: 138 or at position 600 numbered according to SEQ ID NO: 5, 8, or 3636);
   [0401] (ii) the amino acid T, M, A, K, S, Q, V, I, R, N, P, L, H, or Y (e.g., S) at position 594 numbered according to SEQ ID NO: 138, or at position 601 numbered according to SEQ ID NO: 5, 8, or 3636; and/or
   [0402] (iii) the amino acid K, Q, S, P, C, A, G, N, T, R, V, M, H, L, E, F, or Y (e.g. P) at position 595 numbered according to SEQ ID NO: 138 or at position 602 numbered according to SEQ ID NO: 5, 8, or 3636).
[0403] 158. The isolated AAV particle of any one of embodiment 132-157, which further comprises:
   [0404] (i) the amino acid L at position 593 numbered according to SEQ ID NO: 138 or at position 600 numbered according to SEQ ID NO: 5, 8, or 3636);
   [0405] (ii) the amino acid S at position 594 numbered according to SEQ ID NO: 138, or at position 601 numbered according to SEQ ID NO: 5, 8, or 3636; and
   [0406] (iii) the amino acid P at position 595 numbered according to SEQ ID NO: 138 or at position 602 numbered according to SEQ ID NO: 5, 8, or 3636).
[0407] 159. The isolated AAV particle of any one of embodiment 132-158, which further comprises:
   [0408] (i) T at position 593, G at position 594, and/or W at position 595, numbered according to SEQ ID NO: 138;
   [0409] (ii) T at position 600, G at position 601, and/or W at position 602, numbered according to SEQ ID NO: 5, 8, or 3636.
[0410] 160. The isolated AAV particle of any one of embodiments 132-159, wherein the AAV capsid variant further comprises [D], wherein [D] comprises X8, X9, and X10, wherein:
   [0411] (a) position X8 is: T, V, S, L, R, I, A, N, C, Q, M, P, or K;
   [0412] (b) position X9 is: T, M, A, G, K, S, Q, V, I, R, N, P, L, H, or Y; and
   [0413] (c) position X10 is: K, Q, W, S, P, C, A, G, N, T, R, V, M, H, L, E, F, or Y; and/or an amino acid modification, e.g., a conservative substitution, of any of the aforesaid amino acids in (a)-(c).
[0414] 161. The isolated AAV particle of embodiment 160, wherein:
   [0415] (a) position X8 is: T, V, S, L, R, I, A, N, C, Q, or M;
   [0416] (b) position X9 is: T, M, A, G, K, S, Q, V, I, R, N, P, L, or H; and/or
   [0417] (c) position X10 is: K, Q, W, S, P, C, A, G, N, T, R, V, M, H, L, or E.
[0418] 162. The isolated AAV particle of embodiment 160 or 161, wherein [D] comprises:
   [0419] (i) TT, TM, VA, TA, TG, VK, SA, LS, LA, TQ, TV, RI, RA, LT, ST, TS, VS, VT, RQ, IS, VR, LG, TN, VQ, AA, RS, IQ, IA, RG, NS, LQ, VM, SM, VG, CS, TP, SS, AG, TL, LN, TK, CT, AS, LK, LM, LH, RT, RM, VH, TR, SG, VL, QA, NA, AT, NT, RL, IT, IG, RN, NM, NV, MA, IL, VN, SV, RV, PG, QS, RY, SQ, NQ, LL, LP, AQ, TY, NL, SP, LV, KG, VP, AV, KS, AM, SL, AL, RP, IP, MK, AW, GS, KQ, AP, SK, AK, GC, QK, MQ, QP, GP, QQ, AN, GK, QR, PP, AR, GG, MS, NP, KP, MN, KA, SN, MP, HP, GN, RW, MT, SR, GW, QH, GL, QM, VW, MG, AH, QT, GR, SH, GQ, GT, GA, NG, QN, VE, MM, QL, QG, YS, GM, LR, AF, PQ, SW, QW, YA, ML, GF, PA, PS, PT, GY, GV, PW, PR; or
   [0420] (ii) TT, TM, VA, TA, TG, VK, SA, LS, LA, TQ, TV, RI, RA, LT, ST, TS, VS, VT, RQ, IS, VR, LG, TN, VQ, AA, RS, IQ, IA, RG, NS, LQ, VM, SM, VG, CS, TP, SS, AG, TL, LN, TK, CT, AS, LK, LM, LH, RT, RM, VH, TR, SG, VL, QA, NA, AT, NT, RL, IT, IG, RN, NM, NV, MA, IL, VN, SV, RV, MK, AQ, AW, GS, KQ, AP, SK, AK, GC, QK, SP, MQ, SQ, QP, RP, GP, NQ, QQ, AN, GK, QS, QR, PP, AR, GG, MS, NP, KP, MN, KS, KA, SN, MP, HP, GN, RW, MT, AM, SR, GW, QH, GL, AV, QM, VW, MG, AL, AH, SL, QT, GR, SH, LP, GQ, GT, GA, NG, QN, IP, or VE.
[0421] 163. The isolated AAV particle of any one of embodiments 160-162, wherein [D] is or comprises:
   [0422] (i) TTK, TMK, VAQ, TAW, TGS, VKQ, SAP, LSK, LAP, LAQ, TAK, SAK, TGC, TQK, TVA, LSP, TTQ, TAQ, RIA, RAS, TTP, LTP, STP, TSP, TMQ, TSK, VSQ, VSP, TVQ, VTA, RQP, ISG, VRP, LGP, TNQ, VQQ, VAN, AAP, RST, TMA, IQP, IAS, TVS, RGS, NSP, LQP, VTG, VMQ, SMA, VGK, IQS, CSP, LQR, TPP, VTK, SSP, AGP, LAR, TTT, TGG, TLQ, TMS, VAK, RAA, TVG, LNP, LSQ, TKP, TNA, LAT, VTP, VQA, TTS, CTP, TAG, TSQ, TMN, TST, VKP, ASP, VAA, LKS, IAA, TAA, TKA, VSN, TAP, LMP, LHP, RAQ, LTN, RTT, TSV, RMS, VGN, LMQ, TAT, VHP, ISS, VAS, TRW, TMT, RSS, RTG, VAT, VTS, VSS, TNS, VKA, SGP, TGP, TAM, TQP, TQQ, VSR, TGW, VSA, VLS, TQH, LAS, QAP, NAQ, ATP, VQP, TTA, LAA, RSG, LMA, TMP, LAN, VST, SAQ, NTP, TGL, TAV, RLG, RTL, TQM, ITP, TVW, RSA, TAS, TMG, VQS, ISP, VGG, TAL, LAG, RTA, RSP, TLA, LAH, TSL, RLS, LMG, SMQ, TQT, VGS, VSG, VMA, IGG, IAG, TGR, LSH, VQT, RNS, TLP, TKQ, LGQ, NMQ, NVQ, RGG, VMS, TTG, LSR, MAP, ILG, TGT, TSS, TSH, RIG, SAM, TSM, SMG, SMS, TSG, TGA, VNS, VAG, IGS, LGS, VNG, LTA, VQN, TKS, SVG, NAS, TSA, TAN, LTS, RSQ, RIP, RVE, VLP, SVA, LQQ, LST, SAA, RTS, TQN, VNA, LMS, TMM, RSV, TQL, RTP, RQQ, VQG, PGW, STQ, QSP, RYS, TQR, SAG, RQS, SQP, STS, VLG, NQP, LGT, RAG, TGM, LSN, RLP, RQG, RLT, TLR, SAF, SVQ, LLP, RTQ, LPP, AQP, TPQ, TSW, NTT, TTR, TQW, NTQ, TYA, TLS, NLP, ATS, ATQ, LSS, TQA, VMP, NAL, RML, RQL, TLG, TGF, SAL, SQL, LSA, TGQ, TNG, AAA, SAV, LSG, SSR, SPP, LVG, TPA, KGW, VPP, ATG, SAN, SQQ, SSM, AVG, VAP, TPS, RGW, SSL, TYS, TPT, IGW, KSS, TGY, RSL, SVS, TSN, SQM, VPA, AMS, TPG, TGV, VPQ, SLP, ALP, TPW, TPR, SSS, RPP, IPP, AGW, or RPG; or
   [0423] (ii) TTK, TMK, VAQ, TAW, TGS, VKQ, SAP, LSK, LAP, LAQ, TAK, SAK, TGC, TQK, TVA, LSP, TTQ, TAQ, RIA, RAS, TTP, LTP, STP, TSP, TMQ, TSK, VSQ, VSP, TVQ, VTA, RQP, ISG, VRP, LGP, TNQ, VQQ, VAN, AAP, RST, TMA, IQP, IAS, TVS, RGS, NSP, LQP, VTG, VMQ, SMA, VGK, IQS, CSP, LQR, TPP, VTK, SSP, AGP, LAR, TTT, TGG, TLQ, TMS, VAK, RAA, TVG, LNP, LSQ, TKP, TNA, LAT, VTP, VQA, TTS, CTP, TAG, TSQ, TMN, TST, VKP, ASP, VAA, LKS, IAA, TAA, TKA, VSN, TAP, LMP, LHP, RAQ, LTN, RTT, TSV, RMS, VGN, LMQ, TAT, VHP, ISS, VAS, TRW, TMT, RSS, RTG, VAT, VTS, VSS, TNS, VKA, SGP, TGP, TAM, TQP, TQQ, VSR, TGW, VSA, VLS, TQH, LAS, QAP, NAQ, ATP, VQP, TTA, LAA, RSG, LMA, TMP, LAN, VST, SAQ, NTP, TGL, TAV, RLG, RTL, TQM, ITP, TVW, RSA, TAS, TMG, VQS, ISP, VGG, TAL, LAG, RTA, RSP, TLA, LAH, TSL, RLS, LMG, SMQ, TQT, VGS, VSG, VMA, IGG, IAG, TGR, LSH, VQT, RNS, TLP, TKQ, LGQ, NMQ, NVQ, RGG, VMS, TTG, LSR, MAP, ILG, TGT, TSS, TSH, RIG, SAM, TSM, SMG, SMS, TSG, TGA, VNS, VAG, IGS, LGS, VNG, LTA, VQN, TKS, SVG, NAS, TSA, TAN, LTS, RSQ, RIP, RVE, VLP, SVA, LQQ, LST, SAA, RTS, TQN, VNA, or LMS.
[0424] 164. The isolated AAV particle of any one of embodiments 160-163, wherein [D] is or comprises TGW.
[0425] 165. The isolated AAV particle of any one of embodiments 160-163, wherein [D] is or comprises LSP.
[0426] 166. The isolated AAV particle of any one of embodiments 132-164, wherein the AAV capsid variant further comprises one, two, or all of an amino acid other than V at position 596 (e.g., D, F, A, E, L, G, or I), an amino acid other than Q at position 597 (e.g., R, P, K, L, H, or E), and/or an amino acid other than N at position 598 (e.g., H, S, T, P, K, I, D, or Y), relative to a reference sequence numbered according to the amino acid sequence of SEQ ID NO: 138.
[0427] 167. The isolated AAV particle of any one of embodiments 132-166, which further comprises one, two, or all of an amino acid other than V at position 603 (e.g., D, F, A, E, L, G, or I), an amino acid other than Q at position 604 (e.g., R, P, K, L, H, or E), and/or an amino acid other than N at position 605 (e.g., H, S, T, P, K, I, D, or Y), relative to a reference sequence numbered according to the amino acid sequence of SEQ ID NO: 5, 8, or 3636.
[0428] 168. The isolated AAV particle of any one of embodiments 132-167, which further comprises one, two, or all of:
   [0429] (i) the amino acid D, F, A, E, L, G, or I at position 596, numbered according to SEQ ID NO: 138, or at position 603 numbered according to SEQ ID NO: 5, 8, or 3636;
   [0430] (ii) the amino acid R, P, K, L, H, or E at position 597, numbered according to SEQ ID NO: 138, or at position 604 numbered according to SEQ ID NO: 5, 8, or 3636; and/or
   [0431] (iii) the amino acid H, S, T, P, K, I, D, or Y at position 598, numbered according to SEQ ID NO: 138, or at position 605 numbered according to SEQ ID NO: 5, 8, or 3636.
[0432] 169. The isolated AAV particle of any one of embodiments 132-168, which further comprises P, K, E, or H at position 597, numbered according to SEQ ID NO: 138.
[0433] 170. The isolated AAV particle of any one of embodiments 132-169, which further comprises one, two, or all of:
   [0434] (i) the amino acid V at position 596 numbered according to SEQ ID NO: 138 or at position 603 numbered according to SEQ ID NO: 5, 8, or 3636;
   [0435] (ii) the amino acid K, P, E or H at position 597 numbered according to SEQ ID NO: 138 or at position 604 numbered according to SEQ ID NO: 5, 8, or 3636; and
   [0436] (iii) the amino acid N at position 598 numbered according to the amino acid sequence of SEQ ID NO: 138 or at position 605 numbered according to SEQ ID NO: 5, 8, or 3636.
[0437] 171. The isolated AAV particle of any one of embodiments 132-170, wherein the AAV capsid variant further comprises [E], wherein [E] comprises X11, X12, and X13, wherein:
   [0438] (a) position X11 is: V, D, F, A, E, L, G, or I;
   [0439] (b) position X12 is: Q, R, P, K, L, H, or E; and
   [0440] (c) position X13 is: N, H, S, T, P, K, I, D, or Y; and/or an amino acid modification, e.g., a conservative substitution, of any of the aforesaid amino acids in (a)-(c).
[0441] 172. The isolated AAV particle of embodiment 171, wherein:
   [0442] (a) position X11 is: V, D, F, A, E, L, or G;
   [0443] (b) position X12 is: Q, R, P, K, or L; and/or
   [0444] (c) position X13 is: N, H, S, T, P, K, I, or D.
[0445] 173. The isolated AAV particle of embodiment 171 or 172, wherein:
   [0446] (a) position X11 is V;
   [0447] (b) position X12: Q, R, P, K, or L; and/or
   [0448] (c) position X13 is: N.
[0449] 174. The isolated AAV particle of any one of embodiments 171-173, wherein position X12 is P.
[0450] 175. The isolated AAV particle of any one of embodiments 171-174, wherein position X12 is K.
[0451] 176. The isolated AAV particle of any one of embodiments 171-175, wherein position X12 is E or H.
[0452] 177. The isolated AAV particle of any one of embodiments 171-176, wherein [E] comprises:
   [0453] (i) VQ, DQ, FQ, VR, VP, VK, AQ, EQ, LQ, GQ, VL, VH, VE, DK, GH, IQ, QN, QH, QS, QT, QP, RN, PN, KN, QK, QI, LN, QD, HN, KT, KK, EN, QY, or PH; or
   [0454] (ii) VQ, DQ, FQ, VR, VP, VK, AQ, EQ, LQ, GQ, VL, QN, QH, QS, QT, QP, RN, PN, KN, QK, QI, LN, or QD.
[0455] 178. The isolated AAV particle of any one of embodiments 171-177, wherein [E] is or comprises:
   [0456] (i) VQN, DQN, VQH, FQN, VQS, VQT, VQP, VRN, VPN, VKN, AQN, VQK, EQN, VQI, LQN, GQT, VLN, VQD, VHN, GQN, VKT, VKK, FQK, VEN, VQY, DKN, GHN, IQN, or VPH; or
   [0457] (ii) VQN, DQN, VQH, FQN, VQS, VQT, VQP, VRN, VPN, VKN, AQN, VQK, EQN, VQI, LQN, GQT, VLN, or VQD.
[0458] 179. The isolated AAV particle of any one of embodiments 171-178, wherein [E] is or comprises VQN, VPN, or VKN.
[0459] 180. The isolated AAV particle of any one of embodiments 171-178, wherein [E] is or comprises VEN, VHN, VKN, or VPN.
[0460] 181. The isolated AAV particle of any one of embodiments 171-180, wherein [D][E] is or comprises:

(i)
(SEQ ID NO: 5047)
TTKVQN,
(SEQ ID NO: 5013)
TMKVQN,
(SEQ ID NO: 5062)
VAQVQN,
(SEQ ID NO: 4978)
TAWDQN,
(SEQ ID NO: 4992)
TGSVQH,
(SEQ ID NO: 5072)
VKQVQN,
(SEQ ID NO: 4854)
SAPVQN,
(SEQ ID NO: 4912)
LSKVQN,
(SEQ ID NO: 4891)
LAPVQN,
(SEQ ID NO: 4893)
LAQVQN,
(SEQ ID NO: 4968)
TAKVQN,
(SEQ ID NO: 4955)
SAKVQN,
(SEQ ID NO: 4982)
TGCFQN,
(SEQ ID NO: 5026)
TQKVQN,
(SEQ ID NO: 5052)
TVAVQN,
(SEQ ID NO: 4914)
LSPVQN,
(SEQ ID NO: 5050)
TTQVQN,
(SEQ ID NO: 4973)
TAQVQN,
(SEQ ID NO: 4934)
RIAVQN,
(SEQ ID NO: 4931)
RASVQN,
(SEQ ID NO: 5048)
TTPVQN,
(SEQ ID NO: 4853)
LTPVQN,
(SEQ ID NO: 4963)
STPVQN,
(SEQ ID NO: 4861)
TSPVQN,
(SEQ ID NO: 5016)
TMQVQN,
(SEQ ID NO: 5036)
TSKVQN,
(SEQ ID NO: 5092)
VSQVQN,
(SEQ ID NO: 4868)
VSPVQN,
(SEQ ID NO: 5055)
TVQVQN,
(SEQ ID NO: 5097)
VTAVQN,
(SEQ ID NO: 4941)
RQPVQN,
(SEQ ID NO: 4884)
ISGVQN,
(SEQ ID NO: 5087)
VRPVQN,
(SEQ ID NO: 4897)
LGPVQN,
(SEQ ID NO: 5022)
TNQVQN,
(SEQ ID NO: 5084)
VQQVQN,
(SEQ ID NO: 5061)
VANVQN,
(SEQ ID NO: 4870)
AAPVQN,
(SEQ ID NO: 4947)
RSTVQN,
(SEQ ID NO: 5011)
TMAVQN,
(SEQ ID NO: 4882)
IQPVQN,
(SEQ ID NO: 4878)
IASVQN,
(SEQ ID NO: 4867)
TVSVQN,
(SEQ ID NO: 4933)
RGSVQN,
(SEQ ID NO: 4925)
NSPVQN,
(SEQ ID NO: 4908)
LQPVQN,
(SEQ ID NO: 5098)
VTGVQN,
(SEQ ID NO: 5076)
VMQVQN,
(SEQ ID NO: 4959)
SMAVQN,
(SEQ ID NO: 5066)
VGKVQN,
(SEQ ID NO: 4883)
IQSVQN,
(SEQ ID NO: 4874)
CSPVQN,
(SEQ ID NO: 4910)
LQRVQN,
(SEQ ID NO: 4979)
TAWVQH,
(SEQ ID NO: 5024)
TPPVQN,
(SEQ ID NO: 5099)
VTKVQN,
(SEQ ID NO: 4855)
SSPVQN,
(SEQ ID NO: 4871)
AGPVQN,
(SEQ ID NO: 4894)
LARVQN,
(SEQ ID NO: 5051)
TTTVQN,
(SEQ ID NO: 4984)
TGGFQN,
(SEQ ID NO: 5010)
TLQVQN,
(SEQ ID NO: 5018)
TMSVQN,
(SEQ ID NO: 5060)
VAKVQN,
(SEQ ID NO: 4929)
RAAVQN,
(SEQ ID NO: 5054)
TVGVQN,
(SEQ ID NO: 4907)
LNPVQN,
(SEQ ID NO: 4915)
LSQVQN,
(SEQ ID NO: 5006)
TKPVQN,
(SEQ ID NO: 5021)
TNAVQN,
(SEQ ID NO: 4896)
LATVQN,
(SEQ ID NO: 5100)
VTPVQN,
(SEQ ID NO: 5081)
VQAVQN,
(SEQ ID NO: 4860)
TTSVQN,
(SEQ ID NO: 4875)
CTPVQN,
(SEQ ID NO: 4967)
TAGVQN,
(SEQ ID NO: 5040)
TSQVQN,
(SEQ ID NO: 5014)
TMNVQN,
(SEQ ID NO: 5043)
TSTVQN,
(SEQ ID NO: 5071)
VKPVQN,
(SEQ ID NO: 4872)
ASPVQN,
(SEQ ID NO: 5058)
VAAVQN,
(SEQ ID NO: 4901)
LKSVQN,
(SEQ ID NO: 4876)
IAAVQN,
(SEQ ID NO: 4966)
TAAVQN,
(SEQ ID NO: 5005)
TKAVQN,
(SEQ ID NO: 4994)
TGSVQS,
(SEQ ID NO: 5090)
VSNVQN,
(SEQ ID NO: 4971)
TAPVQN,
(SEQ ID NO: 4904)
LMPVQN,
(SEQ ID NO: 4900)
LHPVQN,
(SEQ ID NO: 4930)
RAQVQN,
(SEQ ID NO: 4919)
LTNVQN,
(SEQ ID NO: 4952)
RTTVQN,
(SEQ ID NO: 5044)
TSVVQN,
(SEQ ID NO: 4939)
RMSVQN,
(SEQ ID NO: 5067)
VGNVQN,
(SEQ ID NO: 4905)
LMQVQN,
(SEQ ID NO: 4976)
TATVQN,
(SEQ ID NO: 5069)
VHPVQN,
(SEQ ID NO: 5091)
VSPVQT,
(SEQ ID NO: 4886)
ISSVQN,
(SEQ ID NO: 5063)
VASVQN,
(SEQ ID NO: 5032)
TRWDQN,
(SEQ ID NO: 5020)
TMTVQN,
(SEQ ID NO: 4946)
RSSVQN,
(SEQ ID NO: 4863)
TAWVQN,
(SEQ ID NO: 4949)
RTGVQN,
(SEQ ID NO: 5064)
VATVQN,
(SEQ ID NO: 5101)
VTSVQN,
(SEQ ID NO: 4869)
VSSVQN,
(SEQ ID NO: 5023)
TNSVQN,
(SEQ ID NO: 5070)
VKAVQN,
(SEQ ID NO: 4958)
SGPVQN,
(SEQ ID NO: 4989)
TGPVQN,
(SEQ ID NO: 4969)
TAMVQN,
(SEQ ID NO: 5029)
TQPVQN,
(SEQ ID NO: 5030)
TQQVQN,
(SEQ ID NO: 5093)
VSRVQN,
(SEQ ID NO: 5002)
TGWVQP,
(SEQ ID NO: 5088)
VSAVQN,
(SEQ ID NO: 5074)
VLSVQN,
(SEQ ID NO: 5025)
TQHVQN,
(SEQ ID NO: 4895)
LASVQN,
(SEQ ID NO: 4928)
QAPVQN,
(SEQ ID NO: 4922)
NAQVQN,
(SEQ ID NO: 4873)
ATPVQN,
(SEQ ID NO: 5083)
VQPVQN,
(SEQ ID NO: 5045)
TTAVQN,
(SEQ ID NO: 5004)
TGWVRN,
(SEQ ID NO: 4852)
LAAVQN,
(SEQ ID NO: 5039)
TSPDQN,
(SEQ ID NO: 4943)
RSGVQN,
(SEQ ID NO: 4988)
TGGVQT,
(SEQ ID NO: 5000)
TGWVPN,
(SEQ ID NO: 5049)
TTPVQT,
(SEQ ID NO: 4902)
LMAVQN,
(SEQ ID NO: 5015)
TMPVQN,
(SEQ ID NO: 4890)
LANVQN,
(SEQ ID NO: 5096)
VSTVQN,
(SEQ ID NO: 4957)
SAQVQN,
(SEQ ID NO: 4926)
NTPVQN,
(SEQ ID NO: 5095)
VSSVQT,
(SEQ ID NO: 5056)
TVSVKN,
(SEQ ID NO: 5102)
TGLVQN,
(SEQ ID NO: 4865)
TGSVQN,
(SEQ ID NO: 4983)
TGGAQN,
(SEQ ID NO: 4977)
TAVVQN,
(SEQ ID NO: 4937)
RLGVQN,
(SEQ ID NO: 4950)
RTLVQN,
(SEQ ID NO: 5027)
TQMVQN,
(SEQ ID NO: 4887)
ITPVQN,
(SEQ ID NO: 5057)
TVWVQK,
(SEQ ID NO: 4942)
RSAVQN,
(SEQ ID NO: 4974)
TASVQN,
(SEQ ID NO: 5012)
TMGVQN,
(SEQ ID NO: 4986)
TGGVQH,
(SEQ ID NO: 5085)
VQSVQN,
(SEQ ID NO: 4864)
TGGVQN,
(SEQ ID NO: 4885)
ISPVQN,
(SEQ ID NO: 5103)
TGWVKN,
(SEQ ID NO: 4990)
TGSAQN,
(SEQ ID NO: 4857)
TGWAQN,
(SEQ ID NO: 5019)
TMSVQT,
(SEQ ID NO: 5065)
VGGVQN,
(SEQ ID NO: 4892)
LAPVQT,
(SEQ ID NO: 4862)
TALVQN,
(SEQ ID NO: 4888)
LAGVQN,
(SEQ ID NO: 4948)
RTAVQN,
(SEQ ID NO: 4944)
RSPVQN,
(SEQ ID NO: 4859)
TLAVQN,
(SEQ ID NO: 4889)
LAHVQN,
(SEQ ID NO: 5037)
TSLVQN,
(SEQ ID NO: 4938)
RLSVQN,
(SEQ ID NO: 4903)
LMGVQN,
(SEQ ID NO: 4961)
SMQVQN,
(SEQ ID NO: 5031)
TQTVQN,
(SEQ ID NO: 4997)
TGWEQN,
(SEQ ID NO: 5068)
VGSVQN,
(SEQ ID NO: 5089)
VSGVQN,
(SEQ ID NO: 5075)
VMAVQN,
(SEQ ID NO: 4879)
IGGVQN,
(SEQ ID NO: 4877)
IAGVQN,
(SEQ ID NO: 4856)
TGRVQN,
(SEQ ID NO: 4911)
LSHVQN,
(SEQ ID NO: 5086)
VQTVQN,
(SEQ ID NO: 4866)
TGWDQN,
(SEQ ID NO: 4940)
RNSVQN,
(SEQ ID NO: 5009)
TLPVQN,
(SEQ ID NO: 5007)
TKQVQN,
(SEQ ID NO: 4898)
LGQVQN,
(SEQ ID NO: 4924)
NMQVQN,
(SEQ ID NO: 4927)
NVQVQN,
(SEQ ID NO: 4993)
TGSVQI,
(SEQ ID NO: 4932)
RGGVQN,
(SEQ ID NO: 5077)
VMSVQN,
(SEQ ID NO: 5046)
TTGVQN,
(SEQ ID NO: 4913)
LSPVQK,
(SEQ ID NO: 4916)
LSRVQN,
(SEQ ID NO: 5094)
VSSVQK,
(SEQ ID NO: 4972)
TAPVQT,
(SEQ ID NO: 4921)
MAPVQN,
(SEQ ID NO: 4881)
ILGVQN,
(SEQ ID NO: 4975)
TASVQT,
(SEQ ID NO: 4991)
TGSLON,
(SEQ ID NO: 4996)
TGTVQN,
(SEQ ID NO: 4995)
TGSVQT,
(SEQ ID NO: 5042)
TSSVQT,
(SEQ ID NO: 5035)
TSHVQN,
(SEQ ID NO: 4935)
RIGVQN,
(SEQ ID NO: 4999)
TGWGQT,
(SEQ ID NO: 4956)
SAMVQN,
(SEQ ID NO: 5038)
TSMVQN,
(SEQ ID NO: 4960)
SMGVQN,
(SEQ ID NO: 4962)
SMSVQN,
(SEQ ID NO: 5041)
TSSVQN,
(SEQ ID NO: 5034)
TSGVQN,
(SEQ ID NO: 4981)
TGAVQN,
(SEQ ID NO: 5080)
VNSVQN,
(SEQ ID NO: 5059)
VAGVQN,
(SEQ ID NO: 4880)
IGSVQN,
(SEQ ID NO: 4899)
LGSVQN,
(SEQ ID NO: 5079)
VNGVQN,
(SEQ ID NO: 4918)
LTAVQN,
(SEQ ID NO: 5082)
VQNVQN,
(SEQ ID NO: 5008)
TKSVQN,
(SEQ ID NO: 4965)
SVGVQN,
(SEQ ID NO: 4980)
TAWVQT,
(SEQ ID NO: 4923)
NASVQN,
(SEQ ID NO: 5033)
TSAVQN,
(SEQ ID NO: 5017)
TMSVKN,
(SEQ ID NO: 4970)
TANVQN,
(SEQ ID NO: 4998)
TGWFQN,
(SEQ ID NO: 4985)
TGGVLN,
(SEQ ID NO: 4920)
LTSVQN,
(SEQ ID NO: 5003)
TGWVQT,
(SEQ ID NO: 4945)
RSQVQN,
(SEQ ID NO: 4936)
RIPVQN,
(SEQ ID NO: 5001)
TGWVQD,
(SEQ ID NO: 4953)
RVEVQN,
(SEQ ID NO: 5073)
VLPVQN,
(SEQ ID NO: 4987)
TGGVQK,
(SEQ ID NO: 4964)
SVAVQN,
(SEQ ID NO: 4909)
LQQVQN,
(SEQ ID NO: 4917)
LSTVQN,
(SEQ ID NO: 4954)
SAAVQN,
(SEQ ID NO: 4951)
RTSVQN,
(SEQ ID NO: 5028)
TQNVQN,
(SEQ ID NO: 5078)
VNAVQN,
(SEQ ID NO: 5053)
TVAVQT,
(SEQ ID NO: 4906)
LMSVQN,
(SEQ ID NO: 4851)
TGWVQN,
(SEQ ID NO: 5105)
TGWVQH,
(SEQ ID NO: 4858)
TGWVQS,
(SEQ ID NO: 5205)
TMMVQN,
(SEQ ID NO: 5206)
TGGVQS,
(SEQ ID NO: 5207)
TGSFQN,
(SEQ ID NO: 5208)
RSVVQN,
(SEQ ID NO: 5209)
TGSVQK,
(SEQ ID NO: 5210)
TQLVQN,
(SEQ ID NO: 5211)
TGGVHN,
(SEQ ID NO: 5212)
RTPVQN,
(SEQ ID NO: 5213)
RQQVQN,
(SEQ ID NO: 5214)
TGSVRN,
(SEQ ID NO: 5215)
VQGVQN,
(SEQ ID NO: 5216)
PGWVQT,
(SEQ ID NO: 5217)
STQVQN,
(SEQ ID NO: 5218)
QSPVQN,
(SEQ ID NO: 5219)
RYSVQN,
(SEQ ID NO: 5220)
TQRVQN,
(SEQ ID NO: 5221)
SAGVQN,
(SEQ ID NO: 5222)
SAPVQT,
(SEQ ID NO: 5223)
RQSVQN,
(SEQ ID NO: 5224)
SQPVQN,
(SEQ ID NO: 5225)
VASVKN,
(SEQ ID NO: 5226)
TAWVRN,
(SEQ ID NO: 5227)
TGGGQN,
(SEQ ID NO: 5228)
STSVQN,
(SEQ ID NO: 5229)
VLGVQN,
(SEQ ID NO: 5230)
NQPVQN,
(SEQ ID NO: 5231)
LGTVQN,
(SEQ ID NO: 5232)
RAGVQN,
(SEQ ID NO: 5233)
TGGVKN,
(SEQ ID NO: 5234)
TAWLQN,
(SEQ ID NO: 5235)
TRWVQK,
(SEQ ID NO: 5236)
LAPVKN,
(SEQ ID NO: 5237)
TGSVQD,
(SEQ ID NO: 5238)
TGMVQN,
(SEQ ID NO: 5239)
LSNVQN,
(SEQ ID NO: 5240)
RLPVQN,
(SEQ ID NO: 5241)
RQGVQN,
(SEQ ID NO: 5242)
STPVQT,
(SEQ ID NO: 5243)
TTPVKN,
(SEQ ID NO: 5244)
RLTVQN,
(SEQ ID NO: 5245)
TLRVQN,
(SEQ ID NO: 5246)
SAFVQN,
(SEQ ID NO: 5247)
SVQVQN,
(SEQ ID NO: 5248)
LLPVQN,
(SEQ ID NO: 5249)
RTQVQN,
(SEQ ID NO: 5250)
TGSDQN,
(SEQ ID NO: 5251)
VASDQN,
(SEQ ID NO: 5252)
VSPVKN,
(SEQ ID NO: 5253)
LPPVQN,
(SEQ ID NO: 5254)
SSPVQT,
(SEQ ID NO: 5255)
AQPVQN,
(SEQ ID NO: 5256)
TPQVQN,
(SEQ ID NO: 5257)
TSWVQN,
(SEQ ID NO: 5258)
TGGDQN,
(SEQ ID NO: 5109)
LSPVKN,
(SEQ ID NO: 5259)
SSPVKN,
(SEQ ID NO: 5260)
NTTVQN,
(SEQ ID NO: 5261)
TTRVQN,
(SEQ ID NO: 5262)
TQWVQN,
(SEQ ID NO: 5263)
TGSVHN,
(SEQ ID NO: 5264)
TGGLQN,
(SEQ ID NO: 5265)
TAWVQK,
(SEQ ID NO: 5266)
TGRVQT,
(SEQ ID NO: 5267)
NTQVQN,
(SEQ ID NO: 5268)
TGWLQN,
(SEQ ID NO: 5269)
TYAVQN,
(SEQ ID NO: 5270)
TLSVQN,
(SEQ ID NO: 5271)
NLPVQN,
(SEQ ID NO: 5272)
TSSDQN,
(SEQ ID NO: 5273)
ATSVQN,
(SEQ ID NO: 5274)
TAWFQN,
(SEQ ID NO: 5275)
ATQVQN,
(SEQ ID NO: 5276)
VSSVKN,
(SEQ ID NO: 5107)
LSSVQN,
(SEQ ID NO: 5277)
TGSGQN,
(SEQ ID NO: 5278)
LQPVQT,
(SEQ ID NO: 5279)
VSAVKN,
(SEQ ID NO: 5280)
TQAVQN,
(SEQ ID NO: 5281)
TGWVQK,
(SEQ ID NO: 5282)
VMPVQN,
(SEQ ID NO: 5283)
TVSVQK,
(SEQ ID NO: 5284)
TAWAQN,
(SEQ ID NO: 5285)
NALVQN,
(SEQ ID NO: 5286)
RMLVQN,
(SEQ ID NO: 5287)
TVAVKN,
(SEQ ID NO: 5288)
RQLVQN,
(SEQ ID NO: 5289)
TLGVQN,
(SEQ ID NO: 5290)
LGPVQT,
(SEQ ID NO: 5291)
TGSVKN,
(SEQ ID NO: 5292)
TMSDQN,
(SEQ ID NO: 5293)
LASVKN,
(SEQ ID NO: 5294)
TGFVQN,
(SEQ ID NO: 5295)
SALVQN,
(SEQ ID NO: 5296)
TGWVKT,
(SEQ ID NO: 5297)
SQLVQN,
(SEQ ID NO: 5298)
TGWGQN,
(SEQ ID NO: 5299)
LSAVQN,
(SEQ ID NO: 5300)
TMQVQT,
(SEQ ID NO: 5301)
TGQVQN,
(SEQ ID NO: 5302)
TSPVKN,
(SEQ ID NO: 5303)
LSQVQT,
(SEQ ID NO: 5304)
TGSVLN,
(SEQ ID NO: 5305)
TNGVQN,
(SEQ ID NO: 5306)
TGWVKK,
(SEQ ID NO: 5307)
AAAVQN,
(SEQ ID NO: 5308)
SAVVQN,
(SEQ ID NO: 5309)
PGWVQH,
(SEQ ID NO: 5310)
TASDQN,
(SEQ ID NO: 5106)
LSGVQN,
(SEQ ID NO: 5311)
SSRVQN,
(SEQ ID NO: 5312)
SPPVQN,
(SEQ ID NO: 5313)
VQPVQT,
(SEQ ID NO: 5314)
TSSVKN,
(SEQ ID NO: 5315)
LSPLQN,
(SEQ ID NO: 5316)
VSQVQK,
(SEQ ID NO: 5317)
LVGVQN,
(SEQ ID NO: 5318)
TLSVKN,
(SEQ ID NO: 5319)
TGWFQK,
(SEQ ID NO: 5320)
TPAVQN,
(SEQ ID NO: 5321)
TVGVKN,
(SEQ ID NO: 5322)
KGWDQN,
(SEQ ID NO: 5323)
TAWVLN,
(SEQ ID NO: 5324)
VPPVQN,
(SEQ ID NO: 5325)
ATGVQN,
(SEQ ID NO: 5326)
TGGVQI,
(SEQ ID NO: 5327)
TGWVLN,
(SEQ ID NO: 5328)
TAWGQN,
(SEQ ID NO: 5329)
TGWVHN,
(SEQ ID NO: 5330)
LGSVQT,
(SEQ ID NO: 5331)
SANVQN,
(SEQ ID NO: 5332)
TGGVQD,
(SEQ ID NO: 5333)
TMAVKN,
(SEQ ID NO: 5334)
TASVKN,
(SEQ ID NO: 5335)
SSPVQK,
(SEQ ID NO: 5336)
TGTVQT,
(SEQ ID NO: 5337)
TGWVQI,
(SEQ ID NO: 5338)
TVWVKN,
(SEQ ID NO: 5339)
SQQVQN,
(SEQ ID NO: 5340)
VGSVQT,
(SEQ ID NO: 5341)
SSMVQN,
(SEQ ID NO: 5342)
TSPVQK,
(SEQ ID NO: 5343)
AVGVQN,
(SEQ ID NO: 5344)
VAPVQN,
(SEQ ID NO: 5345)
TLPVQK,
(SEQ ID NO: 5346)
TGRVQH,
(SEQ ID NO: 5347)
TPSVQN,
(SEQ ID NO: 5348)
TGWVEN,
(SEQ ID NO: 5349)
RGWVQN,
(SEQ ID NO: 5350)
TGSVEN,
(SEQ ID NO: 5351)
SSLVQN,
(SEQ ID NO: 5352)
TAWVKN,
(SEQ ID NO: 5353)
TYSVQN,
(SEQ ID NO: 5354)
LAAVQT,
(SEQ ID NO: 5355)
TALVKN,
(SEQ ID NO: 5356)
TGWVQY,
(SEQ ID NO: 5357)
TLPVQT,
(SEQ ID NO: 5358)
TGLVQH,
(SEQ ID NO: 5359)
TPTVQN,
(SEQ ID NO: 5360)
TASVQK,
(SEQ ID NO: 5361)
TSPVQI,
(SEQ ID NO: 5362)
IGWVQN,
(SEQ ID NO: 5363)
TGWDKN,
(SEQ ID NO: 5364)
KSSVQN,
(SEQ ID NO: 5365)
TGYVQN,
(SEQ ID NO: 5366)
RGWVQT,
(SEQ ID NO: 5367)
RSLVQN,
(SEQ ID NO: 5368)
TGGVEN,
(SEQ ID NO: 5369)
TGCVRN,
(SEQ ID NO: 5370)
LSPVQS,
(SEQ ID NO: 5371)
TGPVQT,
(SEQ ID NO: 5372)
TVGVQK,
(SEQ ID NO: 5373)
TASGQN,
(SEQ ID NO: 5374)
SVSVQN,
(SEQ ID NO: 5375)
SGPVQT,
(SEQ ID NO: 5376)
VMSVKN,
(SEQ ID NO: 5377)
LGSVQK,
(SEQ ID NO: 5378)
TGLVLN,
(SEQ ID NO: 5379)
TSNVQN,
(SEQ ID NO: 5380)
TGWGHN,
(SEQ ID NO: 5381)
SQMVQN,
(SEQ ID NO: 5382)
TVSVHN,
(SEQ ID NO: 5383)
LSSVQT,
(SEQ ID NO: 5384)
TASVRN,
(SEQ ID NO: 5385)
VPAVQN,
(SEQ ID NO: 5386)
TGRVQK,
(SEQ ID NO: 5387)
AMSVQN,
(SEQ ID NO: 5388)
TAWVHN,
(SEQ ID NO: 5389)
TGLVRN,
(SEQ ID NO: 5390)
RTLVQT,
(SEQ ID NO: 5391)
TGSIQN,
(SEQ ID NO: 5392)
LSSVKN,
(SEQ ID NO: 5393)
TLQVQK,
(SEQ ID NO: 5394)
VGSVKN,
(SEQ ID NO: 5395)
LAPLQN,
(SEQ ID NO: 5396)
TPGVQN,
(SEQ ID NO: 5397)
LSAVQT,
(SEQ ID NO: 5398)
TGVVQN,
(SEQ ID NO: 5399)
VPQVQN,
(SEQ ID NO: 5400)
TGCVQK,
(SEQ ID NO: 5401)
TRWVQT,
(SEQ ID NO: 5402)
TGLDON,
(SEQ ID NO: 5403)
VSSVHN,
(SEQ ID NO: 5404)
KGWVQT,
(SEQ ID NO: 5405)
SLPVQN,
(SEQ ID NO: 5406)
TTSVHN,
(SEQ ID NO: 5407)
TVWVQN,
(SEQ ID NO: 5408)
TAQLQN,
(SEQ ID NO: 5409)
TRWVKN,
(SEQ ID NO: 5410)
TAWIQN,
(SEQ ID NO: 5411)
LSQVKN,
(SEQ ID NO: 5412)
TSTVKN,
(SEQ ID NO: 5413)
ALPVQN,
(SEQ ID NO: 5414)
TSMVQT,
(SEQ ID NO: 5415)
TSSVQH,
(SEQ ID NO: 5416)
TAMVKN,
(SEQ ID NO: 5417)
TPWVQN,
(SEQ ID NO: 5418)
TPRVQN,
(SEQ ID NO: 5419)
SSSVQN,
(SEQ ID NO: 5420)
RPPVQN,
(SEQ ID NO: 5421)
LAGVKN,
(SEQ ID NO: 5422)
TSPAQN,
(SEQ ID NO: 5423)
RSPVQT,
(SEQ ID NO: 5424)
TGWVPH,
(SEQ ID NO: 5425)
PGWGQN,
(SEQ ID NO: 5426)
IPPVQN,
(SEQ ID NO: 5427)
TGRVKN,
(SEQ ID NO: 5428)
TGRLQN,
(SEQ ID NO: 5429)
LSSVQH,
(SEQ ID NO: 5430)
AGWVQT,
(SEQ ID NO: 5431)
TGLVQS,
(SEQ ID NO: 5432)
TGCVQI,
(SEQ ID NO: 5433)
RPGVQN,
(SEQ ID NO: 5434)
TAAVQH,
(SEQ ID NO: 5435)
TGCDQN,
(SEQ ID NO: 5436)
TGRVRN,
(SEQ ID NO: 5437)
TGRDQN;
(ii)
(SEQ ID NO: 5047)
TTKVQN,
(SEQ ID NO: 5013)
TMKVQN,
(SEQ ID NO: 5062)
VAQVQN,
(SEQ ID NO: 4978)
TAWDQN,
(SEQ ID NO: 4992)
TGSVQH,
(SEQ ID NO: 5072)
VKQVQN,
(SEQ ID NO: 4854)
SAPVQN,
(SEQ ID NO: 4912)
LSKVQN,
(SEQ ID NO: 4891)
LAPVQN,
(SEQ ID NO: 4893)
LAQVQN,
(SEQ ID NO: 4968)
TAKVQN,
(SEQ ID NO: 4955)
SAKVQN,
(SEQ ID NO: 4982)
TGCFQN,
(SEQ ID NO: 5026)
TQKVQN,
(SEQ ID NO: 5052)
TVAVQN,
(SEQ ID NO: 4914)
LSPVQN,
(SEQ ID NO: 5050)
TTQVQN,
(SEQ ID NO: 4973)
TAQVQN,
(SEQ ID NO: 4934)
RIAVQN,
(SEQ ID NO: 4931)
RASVQN,
(SEQ ID NO: 5048)
TTPVQN,
(SEQ ID NO: 4853)
LTPVQN,
(SEQ ID NO: 4963)
STPVQN,
(SEQ ID NO: 4861)
TSPVQN,
(SEQ ID NO: 5016)
TMQVQN,
(SEQ ID NO: 5036)
TSKVQN,
(SEQ ID NO: 5092)
VSQVQN,
(SEQ ID NO: 4868)
VSPVQN,
(SEQ ID NO: 5055)
TVQVQN,
(SEQ ID NO: 5097)
VTAVQN,
(SEQ ID NO: 4941)
RQPVQN,
(SEQ ID NO: 4884)
ISGVQN,
(SEQ ID NO: 5087)
VRPVQN,
(SEQ ID NO: 4897)
LGPVQN,
(SEQ ID NO: 5022)
TNQVQN,
(SEQ ID NO: 5084)
VQQVQN,
(SEQ ID NO: 5061)
VANVQN,
(SEQ ID NO: 4870)
AAPVQN,
(SEQ ID NO: 4947)
RSTVQN,
(SEQ ID NO: 5011)
TMAVQN,
(SEQ ID NO: 4882)
IQPVQN,
(SEQ ID NO: 4878)
IASVQN,
(SEQ ID NO: 4867)
TVSVQN,
(SEQ ID NO: 4933)
RGSVQN,
(SEQ ID NO: 4925)
NSPVQN,
(SEQ ID NO: 4908)
LQPVQN,
(SEQ ID NO: 5098)
VTGVQN,
(SEQ ID NO: 5076)
VMQVQN,
(SEQ ID NO: 4959)
SMAVQN,
(SEQ ID NO: 5066)
VGKVQN,
(SEQ ID NO: 4883)
IQSVQN,
(SEQ ID NO: 4874)
CSPVQN,
(SEQ ID NO: 4910)
LQRVQN,
(SEQ ID NO: 4979)
TAWVQH,
(SEQ ID NO: 5024)
TPPVQN,
(SEQ ID NO: 5099)
VTKVQN,
(SEQ ID NO: 4855)
SSPVQN,
(SEQ ID NO: 4871)
AGPVQN,
(SEQ ID NO: 4894)
LARVQN,
(SEQ ID NO: 5051)
TTTVQN,
(SEQ ID NO: 4984)
TGGFQN,
(SEQ ID NO: 5010)
TLQVQN,
(SEQ ID NO: 5018)
TMSVQN,
(SEQ ID NO: 5060)
VAKVQN,
(SEQ ID NO: 4929)
RAAVQN,
(SEQ ID NO: 5054)
TVGVQN,
(SEQ ID NO: 4907)
LNPVQN,
(SEQ ID NO: 4915)
LSQVQN,
(SEQ ID NO: 5006)
TKPVQN,
(SEQ ID NO: 5021)
TNAVQN,
(SEQ ID NO: 4896)
LATVQN,
(SEQ ID NO: 5100)
VTPVQN,
(SEQ ID NO: 5081)
VQAVQN,
(SEQ ID NO: 4860)
TTSVQN,
(SEQ ID NO: 4875)
CTPVQN,
(SEQ ID NO: 4967)
TAGVQN,
(SEQ ID NO: 5040)
TSQVQN,
(SEQ ID NO: 5014)
TMNVQN,
(SEQ ID NO: 5043)
TSTVQN,
(SEQ ID NO: 5071)
VKPVQN,
(SEQ ID NO: 4872)
ASPVQN,
(SEQ ID NO: 5058)
VAAVQN,
(SEQ ID NO: 4901)
LKSVQN,
(SEQ ID NO: 4876)
IAAVQN,
(SEQ ID NO: 4966)
TAAVQN,
(SEQ ID NO: 5005)
TKAVQN,
(SEQ ID NO: 4994)
TGSVQS,
(SEQ ID NO: 5090)
VSNVQN,
(SEQ ID NO: 4971)
TAPVQN,
(SEQ ID NO: 4904)
LMPVQN,
(SEQ ID NO: 4900)
LHPVQN,
(SEQ ID NO: 4930)
RAQVQN,
(SEQ ID NO: 4919)
LTNVQN,
(SEQ ID NO: 4952)
RTTVQN,
(SEQ ID NO: 5044)
TSVVQN,
(SEQ ID NO: 4939)
RMSVQN,
(SEQ ID NO: 5067)
VGNVQN,
(SEQ ID NO: 4905)
LMQVQN,
(SEQ ID NO: 4976)
TATVQN,
(SEQ ID NO: 5069)
VHPVQN,
(SEQ ID NO: 5091)
VSPVQT,
(SEQ ID NO: 4886)
ISSVQN,
(SEQ ID NO: 5063)
VASVQN,
(SEQ ID NO: 5032)
TRWDQN,
(SEQ ID NO: 5020)
TMTVQN,
(SEQ ID NO: 4946)
RSSVQN,
(SEQ ID NO: 4863)
TAWVQN,
(SEQ ID NO: 4949)
RTGVQN,
(SEQ ID NO: 5064)
VATVQN,
(SEQ ID NO: 5101)
VTSVQN,
(SEQ ID NO: 4869)
VSSVQN,
(SEQ ID NO: 5023)
TNSVQN,
(SEQ ID NO: 5070)
VKAVQN,
(SEQ ID NO: 4958)
SGPVQN,
(SEQ ID NO: 4989)
TGPVQN,
(SEQ ID NO: 4969)
TAMVQN,
(SEQ ID NO: 5029)
TQPVQN,
(SEQ ID NO: 5030)
TQQVQN,
(SEQ ID NO: 5093)
VSRVQN,
(SEQ ID NO: 5002)
TGWVQP,
(SEQ ID NO: 5088)
VSAVQN,
(SEQ ID NO: 5074)
VLSVQN,
(SEQ ID NO: 5025)
TQHVQN,
(SEQ ID NO: 4895)
LASVQN,
(SEQ ID NO: 4928)
QAPVQN,
(SEQ ID NO: 4922)
NAQVQN,
(SEQ ID NO: 4873)
ATPVQN,
(SEQ ID NO: 5083)
VQPVQN,
(SEQ ID NO: 5045)
TTAVQN,
(SEQ ID NO: 5004)
TGWVRN,
(SEQ ID NO: 4852)
LAAVQN,
(SEQ ID NO: 5039)
TSPDQN,
(SEQ ID NO: 4943)
RSGVQN,
(SEQ ID NO: 4988)
TGGVQT,
(SEQ ID NO: 5000)
TGWVPN,
(SEQ ID NO: 5049)
TTPVQT,
(SEQ ID NO: 4902)
LMAVQN,
(SEQ ID NO: 5015)
TMPVQN,
(SEQ ID NO: 4890)
LANVQN,
(SEQ ID NO: 5096)
VSTVQN,
(SEQ ID NO: 4957)
SAQVQN,
(SEQ ID NO: 4926)
NTPVQN,
(SEQ ID NO: 5095)
VSSVQT,
(SEQ ID NO: 5056)
TVSVKN,
(SEQ ID NO: 5102)
TGLVQN,
(SEQ ID NO: 4865)
TGSVQN,
(SEQ ID NO: 4983)
TGGAQN,
(SEQ ID NO: 4977)
TAVVQN,
(SEQ ID NO: 4937)
RLGVQN,
(SEQ ID NO: 4950)
RTLVQN,
(SEQ ID NO: 5027)
TQMVQN,
(SEQ ID NO: 4887)
ITPVQN,
(SEQ ID NO: 5057)
TVWVQK,
(SEQ ID NO: 4942)
RSAVQN,
(SEQ ID NO: 4974)
TASVQN,
(SEQ ID NO: 5012)
TMGVQN,
(SEQ ID NO: 4986)
TGGVQH,
(SEQ ID NO: 5085)
VQSVQN,
(SEQ ID NO: 4864)
TGGVQN,
(SEQ ID NO: 4885)
ISPVQN,
(SEQ ID NO: 5103)
TGWVKN,
(SEQ ID NO: 4990)
TGSAQN,
(SEQ ID NO: 4857)
TGWAQN,
(SEQ ID NO: 5019)
TMSVQT,
(SEQ ID NO: 5065)
VGGVQN,
(SEQ ID NO: 4892)
LAPVQT,
(SEQ ID NO: 4862)
TALVQN,
(SEQ ID NO: 4888)
LAGVQN,
(SEQ ID NO: 4948)
RTAVQN,
(SEQ ID NO: 4944)
RSPVQN,
(SEQ ID NO: 4859)
TLAVQN,
(SEQ ID NO: 4889)
LAHVQN,
(SEQ ID NO: 5037)
TSLVQN,
(SEQ ID NO: 4938)
RLSVQN,
(SEQ ID NO: 4903)
LMGVQN,
(SEQ ID NO: 4961)
SMQVQN,
(SEQ ID NO: 5031)
TQTVQN,
(SEQ ID NO: 4997)
TGWEQN,
(SEQ ID NO: 5068)
VGSVQN,
(SEQ ID NO: 5089)
VSGVQN,
(SEQ ID NO: 5075)
VMAVQN,
(SEQ ID NO: 4879)
IGGVQN,
(SEQ ID NO: 4877)
IAGVQN,
(SEQ ID NO: 4856)
TGRVQN,
(SEQ ID NO: 4911)
LSHVQN,
(SEQ ID NO: 5086)
VQTVQN,
(SEQ ID NO: 4866)
TGWDQN,
(SEQ ID NO: 4940)
RNSVQN,
(SEQ ID NO: 5009)
TLPVQN,
(SEQ ID NO: 5007)
TKQVQN,
(SEQ ID NO: 4898)
LGQVQN,
(SEQ ID NO: 4924)
NMQVQN,
(SEQ ID NO: 4927)
NVQVQN,
(SEQ ID NO: 4993)
TGSVQI,
(SEQ ID NO: 4932)
RGGVQN,
(SEQ ID NO: 5077)
VMSVQN,
(SEQ ID NO: 5046)
TTGVQN,
(SEQ ID NO: 4913)
LSPVQK,
(SEQ ID NO: 4916)
LSRVQN,
(SEQ ID NO: 5094)
VSSVQK,
(SEQ ID NO: 4972)
TAPVQT,
(SEQ ID NO: 4921)
MAPVQN,
(SEQ ID NO: 4881)
ILGVQN,
(SEQ ID NO: 4975)
TASVQT,
(SEQ ID NO: 4991)
TGSLON,
(SEQ ID NO: 4996)
TGTVQN,
(SEQ ID NO: 4995)
TGSVQT,
(SEQ ID NO: 5042)
TSSVQT,
(SEQ ID NO: 5035)
TSHVQN,
(SEQ ID NO: 4935)
RIGVQN,
(SEQ ID NO: 4999)
TGWGQT,
(SEQ ID NO: 4956)
SAMVQN,
(SEQ ID NO: 5038)
TSMVQN,
(SEQ ID NO: 4960)
SMGVQN,
(SEQ ID NO: 4962)
SMSVQN,
(SEQ ID NO: 5041)
TSSVQN,
(SEQ ID NO: 5034)
TSGVQN,
(SEQ ID NO: 4981)
TGAVQN,
(SEQ ID NO: 5080)
VNSVQN,
(SEQ ID NO: 5059)
VAGVQN,
(SEQ ID NO: 4880)
IGSVQN,
(SEQ ID NO: 4899)
LGSVQN,
(SEQ ID NO: 5079)
VNGVQN,
(SEQ ID NO: 4918)
LTAVQN,
(SEQ ID NO: 5082)
VQNVQN,
(SEQ ID NO: 5008)
TKSVQN,
(SEQ ID NO: 4965)
SVGVQN,
(SEQ ID NO: 4980)
TAWVQT,
(SEQ ID NO: 4923)
NASVQN,
(SEQ ID NO: 5033)
TSAVQN,
(SEQ ID NO: 5017)
TMSVKN,
(SEQ ID NO: 4970)
TANVQN,
(SEQ ID NO: 4998)
TGWFQN,
(SEQ ID NO: 4985)
TGGVLN,
(SEQ ID NO: 4920)
LTSVQN,
(SEQ ID NO: 5003)
TGWVQT,
(SEQ ID NO: 4945)
RSQVQN,
(SEQ ID NO: 4936)
RIPVQN,
(SEQ ID NO: 5001)
TGWVQD,
(SEQ ID NO: 4953)
RVEVQN,
(SEQ ID NO: 5073)
VLPVQN,
(SEQ ID NO: 4987)
TGGVQK,
(SEQ ID NO: 4964)
SVAVQN,
(SEQ ID NO: 4909)
LQQVQN,
(SEQ ID NO: 4917)
LSTVQN,
(SEQ ID NO: 4954)
SAAVQN,
(SEQ ID NO: 4951)
RTSVQN,
(SEQ ID NO: 5028)
TQNVQN,
(SEQ ID NO: 5078)
VNAVQN,
(SEQ ID NO: 5053)
TVAVQT,
(SEQ ID NO: 4906)
LMSVQN,
(SEQ ID NO: 4851)
TGWVQN;

[0461] (iii) amino acid sequence comprising any portion of an amino acid sequence in (i) or (ii), e.g., any 2, 3, 4, or 5 amino acids, e.g., consecutive amino acids, thereof;
[0462] (iv) an amino acid sequence comprising at least one, two, or three but no more than four modifications, e.g., substitutions (e.g., conservative substitutions), insertions, or deletions, relative to any of the amino acid sequences in (i) or (ii); or
[0463] (v) an amino acid sequence comprising at least one, two, or three but no more than four different amino acids, relative to any one of the amino acid sequences in (i) or (ii).
[0464] 182. The isolated AAV particle of any one of embodiments 171-181, wherein [D][E] is or comprises TGWVQN (SEQ ID NO: 4851), TGWVPN (SEQ ID NO: 5000), or LSPVKN (SEQ ID NO: 5109).
[0465] 183. The isolated AAV particle of any one of embodiments 171-182, wherein:
   [0466] (i) [B] is or comprises: VHLY (SEQ ID NO: 4680), VHHY (SEQ ID NO: 4683), VHIY (SEQ ID NO: 4681), VNLY (SEQ ID NO: 4724), VQLY (SEQ ID NO: 4729), IHLY (SEQ ID NO: 4730), LHLY (SEQ ID NO: 4727), VPLY (SEQ ID NO: 4723), VDLY (SEQ ID NO: 4731), AHLY (SEQ ID NO: 4732), VHRY (SEQ ID NO: 4725), FHLY (SEQ ID NO: 4726), DHLY (SEQ ID NO: 4728), VLLY (SEQ ID NO: 4733), GHLY (SEQ ID NO: 4734), VRLY (SEQ ID NO: 4735), VHVY (SEQ ID NO: 4682), or VYLY (SEQ ID NO: 4736);
   [0467] (ii) [C] is or comprises: AQAQ (SEQ ID NO: 4737), AQPQ (SEQ ID NO: 4739), AKAQ (SEQ ID NO: 4741), DQAQ (SEQ ID NO: 4744), SQAQ (SEQ ID NO: 4738), AHAQ (SEQ ID NO: 4742), AQEQ (SEQ ID NO: 4748), AQAK (SEQ ID NO: 4746), ALAQ (SEQ ID NO: 4749), APAQ (SEQ ID NO: 4745), ARAQ (SEQ ID NO: 4750), AQAH (SEQ ID NO: 4747), AQAP (SEQ ID NO: 4743), or TQAQ (SEQ ID NO: 4751);
   [0468] (iii) [D] is or comprises: TTK, TMK, VAQ, TAW, TGS, VKQ, SAP, LSK, LAP, LAQ, TAK, SAK, TGC, TQK, TVA, LSP, TTQ, TAQ, RIA, RAS, TTP, LTP, STP, TSP, TMQ, TSK, VSQ, VSP, TVQ, VTA, RQP, ISG, VRP, LGP, TNQ, VQQ, VAN, AAP, RST, TMA, IQP, IAS, TVS, RGS, NSP, LQP, VTG, VMQ, SMA, VGK, IQS, CSP, LQR, TPP, VTK, SSP, AGP, LAR, TTT, TGG, TLQ, TMS, VAK, RAA, TVG, LNP, LSQ, TKP, TNA, LAT, VTP, VQA, TTS, CTP, TAG, TSQ, TMN, TST, VKP, ASP, VAA, LKS, IAA, TAA, TKA, VSN, TAP, LMP, LHP, RAQ, LTN, RTT, TSV, RMS, VGN, LMQ, TAT, VHP, ISS, VAS, TRW, TMT, RSS, RTG, VAT, VTS, VSS, TNS, VKA, SGP, TGP, TAM, TQP, TQQ, VSR, TGW, VSA, VLS, TQH, LAS, QAP, NAQ, ATP, VQP, TTA, LAA, RSG, LMA, TMP, LAN, VST, SAQ, NTP, TGL, TAV, RLG, RTL, TQM, ITP, TVW, RSA, TAS, TMG, VQS, ISP, VGG, TAL, LAG, RTA, RSP, TLA, LAH, TSL, RLS, LMG, SMQ, TQT, VGS, VSG, VMA, IGG, IAG, TGR, LSH, VQT, RNS, TLP, TKQ, LGQ, NMQ, NVQ, RGG, VMS, TTG, LSR, MAP, ILG, TGT, TSS, TSH, RIG, SAM, TSM, SMG, SMS, TSG, TGA, VNS, VAG, IGS, LGS, VNG, LTA, VQN, TKS, SVG, NAS, TSA, TAN, LTS, RSQ, RIP, RVE, VLP, SVA, LQQ, LST, SAA, RTS, TQN, VNA, LMS, TMM, RSV, TQL, RTP, RQQ, VQG, PGW, STQ, QSP, RYS, TQR, SAG, RQS, SQP, STS, VLG, NQP, LGT, RAG, TGM, LSN, RLP, RQG, RLT, TLR, SAF, SVQ, LLP, RTQ, LPP, AQP, TPQ, TSW, NTT, TTR, TQW, NTQ, TYA, TLS, NLP, ATS, ATQ, LSS, TQA, VMP, NAL, RML, RQL, TLG, TGF, SAL, SQL, LSA, TGQ, TNG, AAA, SAV, LSG, SSR, SPP, LVG, TPA, KGW, VPP, ATG, SAN, SQQ, SSM, AVG, VAP, TPS, RGW, SSL, TYS, TPT, IGW, KSS, TGY, RSL, SVS, TSN, SQM, VPA, AMS, TPG, TGV, VPQ, SLP, ALP, TPW, TPR, SSS, RPP, IPP, AGW, or RPG; and/or
   [0469] (iv) [E] is or comprises: VQN, DQN, VQH, FQN, VQS, VQT, VQP, VRN, VPN, VKN, AQN, VQK, EQN, VQI, LQN, GQT, VLN, VQD, VHN, GQN, VKT, VKK, FQK, VEN, VQY, DKN, GHN, IQN, or VPH.
[0470] 184. The isolated AAV particle of any one of embodiments 171-183, wherein:
   [0471] (i) [B] is or comprises: VHLY (SEQ ID NO: 4680), VHHY (SEQ ID NO: 4683), or VHIY (SEQ ID NO: 4681);
   [0472] (ii) [C] is or comprises: AQAQ (SEQ ID NO: 4737), AQPQ (SEQ ID NO: 4739), AKAQ (SEQ ID NO: 4741), DQAQ (SEQ ID NO: 4744), or SQAQ (SEQ ID NO: 4738);
   [0473] (iii) [D] is or comprises: TTK, TMK, VAQ, TAW, TGS, VKQ, SAP, LSK, LAP, LAQ, TAK, SAK, TGC, TQK, TVA, LSP, TTQ, TAQ, RIA, RAS, TTP, LTP, STP, TSP, TMQ, TSK, VSQ, VSP, TVQ, VTA, RQP, ISG, VRP, LGP, TNQ, VQQ, VAN, AAP, RST, TMA, IQP, IAS, TVS, RGS, NSP, LQP, VTG, VMQ, SMA, VGK, IQS, CSP, LQR, TPP, VTK, SSP, AGP, LAR, TTT, TGG, TLQ, TMS, VAK, RAA, TVG, LNP, LSQ, TKP, TNA, LAT, VTP, VQA, TTS, CTP, TAG, TSQ, TMN, TST, VKP, ASP, VAA, LKS, IAA, TAA, TKA, VSN, TAP, LMP, LHP, RAQ, LTN, RTT, TSV, RMS, VGN, LMQ, TAT, VHP, ISS, VAS, TRW, TMT, RSS, RTG, VAT, VTS, VSS, TNS, VKA, SGP, TGP, TAM, TQP, TQQ, VSR, TGW, VSA, VLS, TQH, LAS, QAP, NAQ, ATP, VQP, TTA, LAA, RSG, LMA, TMP, LAN, VST, SAQ, NTP, TGL, TAV, RLG, RTL, TQM, ITP, TVW, RSA, TAS, TMG, VQS, ISP, VGG, TAL, LAG, RTA, RSP, TLA, LAH, TSL, RLS, LMG, SMQ, TQT, VGS, VSG, VMA, IGG, IAG, TGR, LSH, VQT, RNS, TLP, TKQ, LGQ, NMQ, NVQ, RGG, VMS, TTG, LSR, MAP, ILG, TGT, TSS, TSH, RIG, SAM, TSM, SMG, SMS, TSG, TGA, VNS, VAG, IGS, LGS, VNG, LTA, VQN, TKS, SVG, NAS, TSA, TAN, LTS, RSQ, RIP, RVE, VLP, SVA, LQQ, LST, SAA, RTS, TQN, VNA, or LMS; and/or
   [0474] (iv) [E] is or comprises: VQN, DQN, VQH, FQN, VQS, VQT, VQP, VRN, VPN, VKN, AQN, VQK, EQN, VQI, LQN, GQT, VLN, or VQD.
[0475] 185. The isolated AAV particle of any one of embodiments 171-184, wherein [A][B][C][D][E] comprises:
   [0476] (i) the amino acid sequence of any of SEQ ID NOs: 143, 148, 149, 151, 153, 154-158, 160-163, 166, 168, 170, 171, 173-175, 177-179, 181, 182, 184-188, 191-197, 199-210, 212-215, 217-225, 227-231, 233, 234, 236-240, 243-262, 265, 267, 268, 270-277, 279, 282, 284-286, 288-293, 295, 296, 298, 300-314, 316-327, 329, 331, 332, 334, 336, 337-344, 346-350, 352-354, 356-365, 367, 369, 371-380, 382-385, 387, 392-394, 396, 397, 399-401, 404-411, 413-415, 417, 419-429, 432, 433, 435-437, 438, 440-442, 444-447, 450-454, 456, 458-461, 464, 465, 467-469, 471-484, 487-495, 497, 498, 500-503, 505, 507-512, 514-517, 522-525, 528-539, 542-545, 547, 551-555, 558-561, 563-568, 570, 573, 574, 576, 579, 581, 582, 584, 586, 587, 591-596, 598, 601, 604, 605, 606, 607, 610, 612, 614-619, 624-629, 631-636, 640, 641, 645, 646, 649, 650, 656, 658, 661, 663, 664, 666, 668, 669, 670, 672, 673, 674, 675, 677, 679, 683, 684, 686, 688, 689, 691, 693, 695, 696, 697, 699, 700, 701, 702, 704-706, 709-714, 720, 722, 725-731, 733, 736, 740, 745, 749-752, 754, 755, 757, 758, 760-765, 767, 768, 770, 771, 773, 778-780, 783-788, 792-794, 797-799, 801, 802, 804-806, 812, 814, 815, 817, 818, 820, 821, 824, 828, 831, 832, 834-837, 839, 840-845, 847, 848, 850-855, 857-859, 861, 862, 865, 866, 869-872, 874-876, 882-884, 887, 889-895, 897, 899, 901, 903-905, 907, 908, 910, 911, 913, 915, 919, 920, 923, 924, 926, 927, 929, 931-933, 935, 937, 939-949, 952-955, 957, 958, 960, 962, 964, 965, 967, 971, 973, 974, 976, 977, 981, 985-989, 992, 994, 997-1000, 1002, 1004, 1006-1008, 1010, 1013, 1015, 1017, 1018, 1020, 1021, 1023-1025, 1027, 1029-1031, 1033-1035, 1037-1040, 1043, 1046, 1049, 1052, 1053, 1056, 1057, 1059, 1062, 1064, 1065, 1067, 1068, 1070, 1073, 1075, 1077-1080, 1083-1087, 1089, 1090, 1093, 1094, 1097, 1100, 1101, 1103, 1105-1107, 1110-1112, 1114-1117, 1119, 1121, 1125, 1126, 1129, 1132, 1133, 1135;
   [0477] (ii) an amino acid sequence comprising any portion of an amino acid sequence in (i), e.g., any 2, 3, 4, 5, 6, 7, 8, 9, 10, 11, 12, 13, 14, 15, 16, 17, or 18 amino acids, e.g., consecutive amino acids, thereof;
   [0478] (iii) an amino acid sequence comprising at least one, two, or three but no more than four modifications, e.g., substitutions (e.g., conservative substitutions), insertions, or deletions, relative to any of the amino acid sequences in (i); or
   [0479] (iv) an amino acid sequence comprising at least one, two, or three but no more than four different amino acids, relative to any one of the amino acid sequences in (i).
[0480] 186. The isolated AAV particle of any one of embodiments 171-185, wherein [A][B][C][D][E] comprises:
   [0481] (i) the amino acid sequence of any of SEQ ID NOs: 139, 143, 148, 149, 151, 153-158, 160-163, 166, 168, 170, 171, 173-175, 177-179, 181, 182, 184-188, 191-197, 199, 200, 201-210, 212-215, 217-225, 227-231, 233, 234, 236-240, 243-262, 265, 267, 268, 270-277, 279, 282, 284-286, 288-293, 295, 296, 298, 300-314, 316-327, 329, 331, 332, 334, 336, 337-344, 346-350, 352-354, 356-365, 367, 369, 371-380, 382-385, 387, 392-394, 396, 397, 399-401, 404, 405, 406-411, 413-415, 417, 419-429, 432, 433, 435-438, 440-442, 444-447, 450-454, 456, 458-461, 464, 465, 467-469, or 471-476;
   [0482] (ii) an amino acid sequence comprising any portion of an amino acid sequence in (i), e.g., any 2, 3, 4, 5, 6, 7, 8, 9, 10, 11, 12, 13, 14, 15, 16, 17, or 18 amino acids, e.g., consecutive amino acids, thereof;
   [0483] (iii) an amino acid sequence comprising at least one, two, or three but no more than four modifications, e.g., substitutions (e.g., conservative substitutions), insertions, or deletions, relative to any of the amino acid sequences in (i); or
   [0484] (iv) an amino acid sequence comprising at least one, two, or three but no more than four different amino acids, relative to any one of the amino acid sequences in (i).
[0485] 187. The isolated AAV particle of any one of embodiments 171-186, wherein [A][B][C][D][E] comprises the amino acid sequence of PLNGAVHLYAQAQTGWVPN (SEQ ID NO: 314).
[0486] 188. The isolated AAV particle of any one of embodiments 171-186, wherein [A][B][C][D][E] comprises the amino acid sequence of PLNGAVHLYAQAQLSPVKN (SEQ ID NO: 566).
[0487] 189. The isolated AAV particle of any one of embodiments 171-186, wherein [A][B][C][D][E] comprises the amino acid sequence the amino acid sequence of PLNGAVHLYAQAQTGWVQN (SEQ ID NO: 476).
[0488] 190. The isolated AAV particle of any one of embodiments 132-189, wherein [A][B] is present in loop VIII.
[0489] 191. The isolated AAV particle of any one of embodiments 171-190, wherein [C], [D], and/or [E] is present in loop VIII.
[0490] 192. The isolated AAV particle of any one of embodiments 171-191, wherein [A][B][C][D][E] is present in loop VIII.
[0491] 193. The isolated AAV particle of any one of embodiments 171-192, which comprises an amino acid other than A at position 587 and/or an amino acid other than Q at position 588, numbered according to SEQ ID NO: 138.
[0492] 194. The isolated AAV particle of any one of embodiments 171-193, which comprises:
   [0493] (i) the amino acid P at position 587, numbered according to SEQ ID NO: 5, 8, 138, or 3636; and/or
   [0494] (ii) the amino acid L at position 588, numbered according to SEQ ID NO: 5, 8, 138, or 3636.
[0495] 195. The isolated AAV particle of any one of embodiments 132-194, wherein [A] is present immediately subsequent to position 586, relative to a reference sequence numbered according to the amino acid sequence of SEQ ID NO: 5, 8, 138, or 3636.
[0496] 196. The isolated AAV particle of any one of embodiments 132-195, wherein [A] is present immediately subsequent to position 586, and replaces positions 587 and 588 (e.g., A587 and Q588), numbered according to SEQ ID NO: 138.
[0497] 197. The isolated AAV particle of any one of embodiments 132-196, wherein [A] replaces positions 587 and 588 (e.g., A587 and Q588), numbered according to SEQ ID NO: 138.
[0498] 198. The isolated AAV particle of any one of embodiments 132-197, wherein [A] corresponds to positions 587-591 of SEQ ID NO: 5, 8, or 3636.
[0499] 199. The isolated AAV particle of any one of embodiments 132-198, wherein [B] is present immediately subsequent to [A].
[0500] 200. The isolated AAV particle of any one of embodiments 132-199, wherein [B] is present immediately subsequent to [A], wherein [A] is present immediately subsequent to position 586, relative to a reference sequence numbered according to the amino acid sequence of SEQ ID NO: 5, 8, 138, or 3636.
[0501] 201. The isolated AAV particle of any one of embodiments 132-200, wherein [B] is present immediately subsequent to [A], wherein [A] is present immediately subsequent to position 586 and replaces positions 587 and 588 (e.g., A587 and Q588), numbered according to SEQ ID NO: 138.
[0502] 202. The isolated AAV particle of any one of embodiments 132-201, wherein [B] corresponds to positions 592 to 595 of SEQ ID NO: 5, 8, or 3636.
[0503] 203. The isolated AAV particle of any one of embodiments 132-202, wherein [A][B] replaces positions 587 and 588 (e.g., A587 and Q588), numbered according to SEQ ID NO: 138.
[0504] 204. The isolated AAV particle of any one of embodiments 132-203, wherein [A][B] is present immediately subsequent to position 586, numbered according to SEQ ID NO: 138.
[0505] 205. The isolated AAV particle of any one of embodiments 132-204, wherein [A][B] is present immediately subsequent to position 586 and replaces positions 587 and 588 (e.g., A587 and Q588), numbered according to SEQ ID NO: 138.
[0506] 206. The isolated AAV particle of any one of embodiments 132-205, wherein [A][B] corresponds to positions 587-595 of SEQ ID NO: 5, 8, or 3636.
[0507] 207. The isolated AAV particle of any one of embodiments 144-206, wherein [C] is present immediately subsequent to position 588, relative to a reference sequence numbered according to the amino acid sequence of SEQ ID NO: 138.
[0508] 208. The isolated AAV particle of any one of embodiments 144-207, wherein [C] replaces positions 589-592 (e.g., A589, Q590, A591, Q592), numbered according to the amino acid sequence of SEQ ID NO: 138.
[0509] 209. The isolated AAV particle of any one of embodiments 144-208, wherein [C] is present immediately subsequent to position 588, and replaces positions 589-592 (e.g., A589, Q590, A591, Q592), numbered according to the amino acid sequence of SEQ ID NO: 138.
[0510] 210. The isolated AAV particle of any one of embodiments 144-209, wherein [C] corresponds to positions 596-599 of SEQ ID NO: 5, 8, or 3636.
[0511] 211. The isolated AAV particle of any one of embodiments 144-210, wherein [A][B][C] is present immediately subsequent to position 586, numbered according to SEQ ID NO: 138.
[0512] 212. The isolated AAV particle of any one of embodiments 144-211, wherein [A][B][C] replaces positions 587-592 (e.g., A587, Q588, A589, Q590, A591, Q592), numbered according to SEQ ID NO: 138.
[0513] 213. The isolated AAV particle of any one of embodiments 144-212, wherein [A][B][C] is present immediately subsequent to position 586 and replaces positions 587-592 (e.g., A587, Q588, A589, Q590, A591, Q592), numbered according to SEQ ID NO: 138.
[0514] 214. The isolated AAV particle of any one of embodiments 144-213, wherein [A][B][C] corresponds to positions 587-599 of SEQ ID NO: 5, 8, or 3636.
[0515] 215. The isolated AAV particle of any one of embodiments 160-214, wherein [D] is present immediately subsequent to position 592, relative to a reference sequence numbered according to the amino acid sequence of SEQ ID NO: 138.
[0516] 216. The isolated AAV particle of any one of embodiments 160-215, wherein [D] replaces positions 593-595 (e.g., T593, G594, W595), numbered according to the amino acid sequence of SEQ ID NO: 138.
[0517] 217. The isolated AAV particle of any one of embodiments 160-216, wherein [D] is present immediately subsequent to position 592, and replaces positions 593-595 (e.g., T593, G594, W595), numbered according to the amino acid sequence of SEQ ID NO: 138.
[0518] 218. The isolated AAV particle of any one of embodiments 160-217, wherein [D] corresponds to positions 600-602 of SEQ ID NO: 5, 8, or 3636.
[0519] 219. The isolated AAV particle of any one of embodiments 160-218, wherein [C][D] is present immediately subsequent to position 588, numbered according to SEQ ID NO: 138.
[0520] 220. The isolated AAV particle of any one of embodiments 160-219, wherein [C][D] replaces positions 589-595 (e.g., A589, Q590, A591, Q592, T593, G594, W595), numbered according to the amino acid sequence of SEQ ID NO: 138.
[0521] 221. The isolated AAV particle of any one of embodiments 160-220, wherein [C][D] is present immediately subsequent to 588, and replaces positions 589-595 (e.g., A589, Q590, A591, Q592, T593, G594, W595), numbered according to the amino acid sequence of SEQ ID NO: 138.
[0522] 222. The isolated AAV particle of any one of embodiments 160-221, wherein [C][D] corresponds to positions 596-602 of SEQ ID NO: 5, 8, or 3636.
[0523] 223. The isolated AAV particle of any one of embodiments 160-222, wherein [A][B][C][D] is present immediately subsequent to position 586, numbered according to SEQ ID NO: 5, 8, 138, or 3636.
[0524] 224. The isolated AAV particle of any one of embodiments 160-223, wherein [A][B][C][D] replaces positions 587-595 (e.g., A587, Q588, A589, Q590, A591, Q592, T593, G594, W595), numbered according to SEQ ID NO: 138.
[0525] 225. The isolated AAV particle of any one of embodiments 160-224, wherein [A][B][C][D] is present immediately subsequent to position 586 and replaces positions 587-595 (e.g., A587, Q588, A589, Q590, A591, Q592, T593, G594, W595), numbered according to SEQ ID NO: 138.
[0526] 226. The isolated AAV particle of any one of embodiments 160-225, wherein [A][B][C][D] corresponds to positions 587-602 of SEQ ID NO: 5, 8, or 3636.
[0527] 227. The isolated AAV particle of any one of embodiments 171-226, wherein [E] is present immediately subsequent to position 595, relative to a reference sequence numbered according to the amino acid sequence of SEQ ID NO: 138.
[0528] 228. The isolated AAV particle of any one of embodiments 171-227, wherein [E] replaces positions 596-598 (e.g., V596, Q597, N598), numbered according to the amino acid sequence of SEQ ID NO: 138.
[0529] 229. The isolated AAV particle of any one of embodiments 171-228, wherein [E] is present immediately subsequent to position 595, and replaces positions 596-598 (e.g., V596, Q597, N598), numbered according to the amino acid sequence of SEQ ID NO: 138.
[0530] 230. The isolated AAV particle of any one of embodiments 171-229, wherein [E] corresponds to positions 603 to 605 of SEQ ID NO: 5, 8, or 3636.
[0531] 231. The isolated AAV particle of any one of embodiments 171-230, wherein [A][B][C][D][E] is present immediately subsequent to position 586, relative to a reference sequence numbered according to the amino acid sequence of SEQ ID NO: 5, 8, 138, or 3636.
[0532] 232. The isolated AAV particle of any one of embodiments 171-231, wherein [A][B][C][D][E] replaces positions 587-598 (e.g., A587, Q588, A589, Q590, A591, Q592, T593, G594, W595, V596, Q597, N598), numbered according to SEQ ID NO: 138.
[0533] 233. The isolated AAV particle of any one of embodiments 171-232, wherein [A][B][C][D][E] is present immediately subsequent to position 586 and replaces positions 587-598 (e.g., A587, Q588, A589, Q590, A591, Q592, T593, G594, W595, V596, Q597, N598), numbered according to SEQ ID NO: 138.
[0534] 234. The isolated AAV particle of any one of embodiments 171-233, wherein [A][B][C][D][E] corresponds to positions 587-605 of SEQ ID NO: 5, 8, or 3636.
[0535] 235. The isolated AAV particle of any one of embodiments 132-234, wherein the AAV capsid variant comprises from N-terminus to C-terminus, [A][B].
[0536] 236. The isolated AAV particle of any one of embodiments 144-235, wherein the AAV capsid variant comprises from N-terminus to C-terminus, [A][B][C].
[0537] 237. The isolated AAV particle of any one of embodiments 160-236, wherein the AAV capsid variant comprises from N-terminus to C-terminus, [A][B][C][D].
[0538] 238. The isolated AAV particle of any one of embodiments 171-237, wherein the AAV capsid variant comprises from N-terminus to C-terminus, [A][B][C][D][E].
[0539] 239. An isolated, e.g., recombinant, AAV particle comprising an AAV capsid variant and a nucleic acid comprising a transgene encoding an antibody molecule which binds to tau (e.g., human tau), wherein the AAV capsid variant comprises PLNGAVHLY (SEQ ID NO: 3648) and optionally wherein the AAV capsid variant further comprises one, two, or all of an amino acid other than T at position 593 (e.g., A, L, R, V, C, I, K, M, N, P, Q, S), an amino acid other than G at position 594 (e.g., M, S, A, Q, V, T, L, P, H, K, N, I, Y, or R), and/or an amino acid other than W at position 595 (e.g., S, P, T, A, G, L, Q, H, N, R, K, V, E, F, M, C, or Y), relative to a reference sequence numbered according to the amino acid sequence of SEQ ID NO: 138.
[0540] 240. The isolated AAV particle of embodiment 239, wherein:
   [0541] (i) the amino acid T, A, L, R, V, C, I, K, M, N, P, Q, or S is present at position 593, numbered according to the amino acid sequence of SEQ ID NO: 138;
   [0542] (ii) the amino acid G, M, S, A, Q, V, T, L, P, H, K, N, I, Y, or R is present at position 594, numbered according to the amino acid sequence of SEQ ID NO: 138; and/or
   [0543] (iii) the amino acid W, S, P, T, A, G, L, Q, H, N, R, K, V, E, F, M, C, or Y is present at position 595, numbered according to the amino acid sequence of SEQ ID NO: 138.
[0544] 241. An isolated, e.g., recombinant, AAV particle comprising an AAV capsid variant and a nucleic acid comprising a transgene encoding an antibody molecule which binds to tau (e.g., human tau), wherein the AAV capsid variant comprises an amino sequence comprising the amino acid sequence of PLNGAVHLY (SEQ ID NO: 3648); and which further comprises one, two, three, or all of:
   [0545] (i) the amino acid T, A, L, R, V, C, I, K, M, N, P, Q, or S at position 593 numbered according to SEQ ID NO: 138 or at position 600 numbered according to SEQ ID NO: 5, 8, or 3636;
   [0546] (ii) the amino acid G, M, S, A, Q, V, T, L, P, H, K, N, I, Y, or R at position 594 numbered according to SEQ ID NO: 138 or at position 601 numbered according to SEQ ID NO: 5, 8, or 3636; and/or
   [0547] (iii) the amino acid W, S, P, T, A, G, L, Q, H, N, R, K, V, E, F, M, C, or Y at position 595 numbered according to SEQ ID NO: 138 or at position 602 numbered according to SEQ ID NO: 5, 8, or 3636;
   [0548] optionally, provided that the amino acids at positions 593-595, relative to a reference sequence numbered according to the amino acid sequence of SEQ ID NO: 138, does not comprise the amino acid sequence of TGW.
[0549] 242. The isolated AAV particle of any one of embodiments 239-241, wherein the AAV capsid variant comprises:
   [0550] (i) the amino acid L at position 593 numbered according to SEQ ID NO: 138 or at position 600 numbered according to SEQ ID NO: 5, 8, or 3636;
   [0551] (ii) the amino acid S at position 594 numbered according to SEQ ID NO: 138 or at position 601 numbered according to SEQ ID NO: 5, 8, or 3636; and/or
   [0552] (iii) the amino acid P at position 595 numbered according to SEQ ID NO: 138 or at position 602 numbered according to SEQ ID NO: 5, 8, or 3636.
[0553] 243. The isolated AAV particle of any one of embodiments 239-242, wherein the to the AAV capsid variant comprises the amino acid sequence of SEQ ID NO: 138, comprise the amino acid sequence of TMS, ASP, LGS, LSS, RST, TAA, TAG, TAL, TAS, TGT, TMA, TQP, TSA, TSP, TST, TVA, TVS, VMS, VSP, VSS, VTP, TGP, VAS, AAA, AAP, AGP, AGW, ALP, AMS, AQP, ATG, ATP, ATQ, ATS, AVG, CSP, CTP, IAA, IAG, IAS, IGG, IGS, IGW, ILG, IPP, IQP, IQS, ISG, ISP, ISS, ITP, KGW, KSS, LAA, LAG, LAH, LAN, LAP, LAQ, LAR, LAS, LAT, LGP, LGQ, LGT, LHP, LKS, LLP, LMA, LMG, LMP, LMQ, LMS, LNP, LPP, LQP, LQQ, LQR, LSA, LSG, LSH, LSK, LSN, LSP, LSQ, LSR, LST, LTA, LTN, LTP, LTS, LVG, MAP, NAL, NAQ, NAS, NLP, NMQ, NQP, NSP, NTP, NTQ, NTT, NVQ, PGW, QAP, QSP, RAA, RAG, RAQ, RAS, RGG, RGS, RGW, RIA, RIG, RIP, RLG, RLP, RLS, RLT, RML, RMS, RNS, RPG, RPP, RQG, RQL, RQP, RQQ, RQS, RSA, RSG, RSP, RSQ, RSS, RSV, RTA, RTG, RTL, RTP, RTQ, RTS, RTT, RVE, RYS, SAA, SAF, SAG, SAK, SAL, SAM, SAN, SAP, SAQ, SAV, SGP, SLP, SMA, SMG, SMQ, SMS, SPP, SQL, SQM, SQP, SQQ, SSL, SSM, SSP, SSR, SSS, STP, STQ, STS, SVA, SVG, SVQ, SVS, TAK, TAM, TAN, TAP, TAQ, TAT, TAV, TAW, TGA, TGC, TGF, TGG, TGL, TGM, TGQ, TGR, TGS, TGV, TGY, TKA, TKP, TKQ, TKS, TLA, TLG, TLP, TLQ, TLR, TLS, TMG, TMK, TMM, TMN, TMP, TMQ, TMT, TNA, TNG, TNQ, TNS, TPA, TPG, TPP, TPQ, TPR, TPS, TPT, TPW, TQA, TQH, TQK, TQL, TQM, TQN, TQQ, TQR, TQT, TQW, TRW, TSG, TSH, TSK, TSL, TSM, TSN, TSQ, TSS, TSV, TSW, TTA, TTG, TTK, TTP, TTQ, TTR, TTS, TTT, TVG, TVQ, TVW, TYA, TYS, VAA, VAG, VAK, VAN, VAQ, VAT, VGG, VGK, VGN, VGS, VHP, VKA, VKP, VKQ, VLG, VLP, VLS, VMA, VMP, VMQ, VNA, VNG, VNS, VPA, VPP, VPQ, VQA, VQG, VQN, VQP, VQQ, VQS, VQT, VRP, VSA, VSG, VSN, VSQ, VSR, VST, VTA, VTG, VTK, VTS, or VAP at positions 593-595 numbered according to SEQ ID NO: 138 or at positions 600-602 numbered according to SEQ ID NO: 5, 8, or 3636.
[0554] 244. The isolated AAV particle of any one of embodiments 239-243, wherein the AAV capsid variant comprises the amino acid sequence LSP at positions 593-595 numbered according to SEQ ID NO: 138 or at positions 600-602 numbered according to SEQ ID NO: 5, 8, or 3636.
[0555] 245. The isolated AAV particle of any one of embodiments 239-244, wherein the AAV capsid variant further comprises one, two, three, or all of an amino acid other than A at position 589 (e.g., D, S, or T), an amino acid other than Q at position 590 (e.g., K, H, L, P, or R), an amino acid other than A at position 591 (e.g., P or E), and/or an amino acid other than Q at position 592 (e.g., H, K, or P).
[0556] 246. The isolated AAV particle of embodiment 245, wherein:
   [0557] (i) the amino acid A, D, S, or T at position 589, numbered according to SEQ ID NO: 138;
   [0558] (ii) the amino acid Q, K, H, L, P, or R at position 590, numbered according to SEQ ID NO: 138;
   [0559] (iii) the amino acid A, E, or P at position 591, numbered according to SEQ ID NO: 138; and/or
   [0560] (iv) the amino acid Q, H, K, or P at position 592, numbered according to SEQ ID NO: 138.
[0561] 247. The isolated AAV particle of embodiment 245 or 246, wherein the AAV capsid variant comprises the amino acid sequence of:
   [0562] (i) AHAQ (SEQ ID NO: 4742), AKAQ (SEQ ID NO: 4741), ALAQ (SEQ ID NO: 4749), APAQ (SEQ ID NO: 4745), AQAH (SEQ ID NO: 4747), AQAK (SEQ ID NO: 4746), AQAP (SEQ ID NO: 4743), AQAQ (SEQ ID NO: 4737), AQEQ (SEQ ID NO: 4748), AQPQ (SEQ ID NO: 4739), ARAQ (SEQ ID NO: 4750), DQAQ (SEQ ID NO: 4744), SQAQ (SEQ ID NO: 4738), or TQAQ (SEQ ID NO: 4751) at positions 589-592 numbered according to SEQ ID NO: 138 or at positions 596-599 numbered according to SEQ ID NO: 5, 8, or 3636; or
   [0563] (ii) AKAQ (SEQ ID NO: 4741), AQAQ (SEQ ID NO: 4737), AQPQ (SEQ ID NO: 4739), DQAQ (SEQ ID NO: 4744), or SQAQ (SEQ ID NO: 4738) at positions 589-592 numbered according to SEQ ID NO: 138 or at positions 596-599 numbered according to SEQ ID NO: 5, 8, or 3636.
[0564] 248. The isolated AAV particle of any one of embodiments 239-247, wherein the AAV capsid variant further comprises one, two, or all of an amino acid other than V at position 596 (e.g., G, F, D, L, A, I, or E), an amino acid other than Q at position 597 (e.g., K, R, H, E, L, or P), and/or an amino acid other than N at position 598 (e.g., H, K, T, I, S, D, P, or Y), relative to a reference sequence numbered according to the amino acid sequence of SEQ ID NO: 138.
[0565] 249. The isolated AAV particle of any one of embodiments 248, wherein:
   [0566] (i) the amino acid V, G, F, D, L, A, I, or E at position 596 numbered according to SEQ ID NO: 138 or at position 603 numbered according to SEQ ID NO: 5, 8, or 3636;
   [0567] (ii) the amino acid Q, K, R, H, E, L, or P at position 597, numbered according to SEQ ID NO: 138 or at position 604 numbered according to SEQ ID NO: 5, 8, or 3636; and/or
   [0568] (iii) the amino acid N, H, K, T, I, S, D, P, or Y at position 598 numbered according to SEQ ID NO: 138 or at position 605 numbered according to SEQ ID NO: 5, 8, or 3636.
[0569] 250. An isolated, e.g., recombinant, AAV particle comprising an AAV capsid variant and a nucleic acid comprising a transgene encoding a transgene encoding an antibody molecule which binds to tau, wherein the AAV capsid variant comprises PLNGAVHLY (SEQ ID NO: 3648), and optionally wherein the AAV capsid variant further comprises one, two, or all of an amino acid other than V at position 596 (e.g., G, F, D, L, A, I, or E), an amino acid other than Q at position 597 (e.g., K, R, H, E, L, or P), and/or an amino acid other than N at position 598 (e.g., H, K, T, I, S, D, P, or Y), numbered according to SEQ ID NO: 138.
[0570] 251. An isolated, e.g., recombinant, AAV particle comprising an AAV capsid variant and a nucleic acid comprising a transgene encoding a transgene encoding an antibody molecule which binds to tau, wherein the AAV capsid variant comprises PLNGAVHLY (SEQ ID NO: 3648), and further comprising one, two, or all of:
   [0571] (i) V, G, F, D, L, A, I, or E at position 596 numbered according to SEQ ID NO: 138 or at position 603 numbered according to SEQ ID NO: 5, 8, or 3636;
   [0572] (ii) Q, K, R, H, E, L, or P at position 597 numbered according to SEQ ID NO: 138 or at position 604 numbered according to SEQ ID NO: 5, 8, or 3636; and/or
   [0573] (iii) N, H, K, T, I, S, D, P, or Y at position 598 numbered according to SEQ ID NO: 138 or at position 605 numbered according to SEQ ID NO: 5, 8, or 3636;
   [0574] optionally, provided that the amino acids at positions 596-598 numbered according to the amino acid sequence of SEQ ID NO: 138 or positions 603-605 of SEQ ID NO: 5, 8, or 3636, does not comprise the amino acid sequence of VQN.
[0575] 252. The isolated AAV particle of any one of embodiments 239-251, which comprises the amino acid P at position 597 numbered according to SEQ ID NO: 138 or at position 604 numbered according to SEQ ID NO: 5, 8, or 3636.
[0576] 253. The isolated AAV particle of any one of embodiments 239-252, which comprises the amino acid K at position 597 numbered according to SEQ ID NO: 138 or at position 604 numbered according to SEQ ID NO: 5, 8, or 3636.
[0577] 254. The isolated AAV particle of any one of embodiments 248-253, wherein the AAV capsid variant comprises the amino acid sequence of:
   [0578] (i) GQN, VQH, VQK, VQT, VQN, FQN, VKN, VQI, DQN, LQN, VQS, VRN, AQN, IQN, VHN, VLN, VEN, VQD, DKN, EQN, FQK, GHN, GQT, VKK, VKT, VPH, VPN, VQP, or VQY at positions 596-598 numbered according to SEQ ID NO: 138 or positions 603-605 numbered according to SEQ ID NO: 5, 8, or 3636; or
   [0579] (ii) VQN, VQT, VQK, DQN, VQH, FQN, AQN, VLN, LQN, VQI, VQS, EQN, GQT, VPN, VQD, VQP, VRN, or VKN at positions 596-598 numbered according to SEQ ID NO: 138 or positions 603-605 numbered according to SEQ ID NO: 5, 8, or 3636.
[0580] 255. The isolated AAV particle of any one of embodiments 248-254, which comprises the amino acid sequence of VKN, VPN, or VQN at positions 596-598 numbered according to SEQ ID NO: 138 or positions 603-605 numbered according to SEQ ID NO: 5, 8, or 3636.
[0581] 256. The isolated AAV particle of any one of embodiments 248-255, which comprises the amino acid sequence of VEN or VHN at positions 596-598 numbered according to SEQ ID NO: 138 or positions 603-605 numbered according to SEQ ID NO: 5, 8, or 363.
[0582] 257. The isolated AAV particle of any one of embodiments 239-256, wherein the AAV capsid variant comprises:
   [0583] (i) the amino acid sequence of any of SEQ ID NOs: 143, 148, 149, 151, 153-158, 160-163, 166, 168, 170, 171, 173-175, 177-179, 181, 182, 184-188,191-197, 199-210,212-215, 217-225, 227-231, 233, 234, 236-240, 243-262, 265, 267, 268, 270-277, 279, 282, 284, 285, 286, 288-293, 295, 296, 298, 300-314, 316-318, 320-327, 329, 331, 332, 334, 336-344, 346-350, 352-354, 356-367, 369, 371-380, 382-385, 387, 392-394, 396, 397, 399-401, 404-411, 413-415, 417, 419-429, 432, 433, 435-437, 438, 440-442, 444-447, 450-453, 456, 458-461, 464, 465, 467-469, 471-478, 480-483, 487-495, 497, 498, 500-503, 505, 507-512, 515-517, 522-525, 528-532, 534-539, 542-545, 547, 551-554, 558-561, 563-568, 570, 573, 574, 576, 579, 581, 582, 584, 586, 587, 592-596, 598, 601, 604-607, 610, 612, 614-619, 624-629, 631, 633-636, 640, 641, 645, 646, 649, 650, 658, 663, 664, 666, 668, 669, 672, 673, 675, 679, 683, 684, 686, 688, 689, 691, 693, 695, 697, 699, 700, 704, 705, 709-712, 720, 722, 726-731, 733, 736, 740, 745, 749, 750-752, 754, 755, 757, 758, 760-765, 767, 768, 771, 778, 780, 783-787, 792, 794, 797, 799-802, 804, 817, 818, 821, 824, 828, 831, 832, 834-837, 840-845, 847, 848, 851-853, 855, 858, 861, 862, 865, 869, 870-872, 874, 876, 882, 883, 887, 889, 890, 892-895, 897, 901, 903, 904, 905, 907, 910, 911, 913, 915, 919, 920, 923, 924, 926, 927, 929, 931-933, 935, 937, 940, 941, 943, 945-949, 953, 955, 957, 958, 960, 962, 964, 965, 971, 973, 974, 977, 986, 988, 989, 992, 994, 997, 998, 1000, 1004, 1007, 1013, 1015, 1017, 1018, 1020, 1025, 1027, 1029, 1030, 1031, 1033-1035, 1037-1039, 1043, 1046, 1049, 1052, 1056, 1057, 1059, 1062, 1065, 1067, 1068, 1070, 1073, 1075, 1077-1079, 1083-1087, 1089, 1090, 1094, 1100, 1101, 1103, 1106, 1107, 1110, 1111, 1112, 1114, 1115, 1117, 1119, 1125, 1126, 1129, 1132, or 1133;
   [0584] (ii) an amino acid sequence comprising any portion of an amino acid sequence in (i), e.g., any 2, 3, 4, 5, 6, 7, 8, 9, 10, 11, 12, 13, 14, 15, 16, 17, or 18 amino acids, e.g., consecutive amino acids, thereof;
   [0585] (iii) an amino acid sequence comprising at least one, two, or three but no more than four modifications, e.g., substitutions (e.g., conservative substitutions), insertions, or deletions, relative to any of the amino acid sequences in (i); or
   [0586] (iv) an amino acid sequence comprising at least one, two, or three but no more than four different amino acids, relative to any one of the amino acid sequences in (i).
[0587] 258. The isolated AAV particle of any one of embodiments 239-257, wherein the AAV capsid variant comprises:
   [0588] (i) the amino acid sequence of any of SEQ ID NOs: 143, 148-151, 153-158, 160-163, 166, 168, 170, 171, 173-175, 177-179, 181, 182, 184-188, 191-197, 199-210, 212-215, 217-225, 227-231, 233, 234, 236-240, 243-262, 265, 267, 268, 270-277, 279, 282, 284-286, 288-293, 295, 296, 298, 300-314, 316-318, 320-327, 329, 331, 332, 334, 336, 337-339, 340-344, 346-350, 352-354, 356-365, 367, 369, 371-380, 382-385, 387, 392-394, 396, 397, 399-401, 404-411, 413-415, 417, 419, 420-429, 432, 433, 435-438, 440-442, 444-447, 450-453, 456, 458, 459, 460, 461, 464, 465, 467-469, or 471-476;
   [0589] (ii) an amino acid sequence comprising any portion of an amino acid sequence in (i), e.g., any 2, 3, 4, 5, 6, 7, 8, 9, 10, 11, 12, 13, 14, 15, 16, 17, or 18 amino acids, e.g., consecutive amino acids, thereof;
   [0590] (iii) an amino acid sequence comprising at least one, two, or three but no more than four modifications, e.g., substitutions (e.g., conservative substitutions), insertions, or deletions, relative to any of the amino acid sequences in (i); or
   [0591] (iv) an amino acid sequence comprising at least one, two, or three but no more than four different amino acids, relative to any one of the amino acid sequences in (i).
[0592] 259. The isolated AAV particle of any one of embodiments 239-258, wherein the amino acid sequence of PLNGAVHLY (SEQ ID NO: 3648) is present in loop VIII.
[0593] 260. The isolated AAV particle of any one of embodiments 239-259, wherein the amino acid sequence of PLNGAVHLY (SEQ ID NO: 3648) is present immediately subsequent to position 586, relative to a reference sequence numbered according to the amino acid sequence of SEQ ID NO: 138.
[0594] 261. The isolated AAV particle of any one of embodiments 239-260, wherein the amino acid sequence of PLNGAVHLY (SEQ ID NO: 3648) replaces positions 587 and 588 (e.g., A587 and Q588), numbered according to SEQ ID NO: 138.
[0595] 262. The isolated AAV particle of any one of embodiments 239-261, wherein the amino acid sequence of PLNGAVHLY (SEQ ID NO: 3648) is present immediately subsequent to position 586 and replaces positions 587 and 588 (e.g., A587 and Q588), numbered according to SEQ ID NO: 138.
[0596] 263. The isolated AAV particle of any one of embodiments 239-262, wherein the amino acid sequence of PLNGAVHLY (SEQ ID NO: 3648) corresponds to positions 587-595 of SEQ ID NO: 5, 8, or 3636.
[0597] 264. An isolated, e.g., recombinant, AAV particle comprising an AAV capsid variant and a nucleic acid comprising a transgene encoding an antibody molecule which binds to tau (e.g., human tau), wherein the AAV capsid variant comprises X1-X2-X3-X4-X5-X6-X7-X8-X9-X10-X11-X12-X13-X14-X15-X16-X17-X18-X19, wherein:
   [0598] (i) X1 is: P, A, D, E, F, G, H, K, L, N, Q, R, S, T, or V;
   [0599] (ii) X2 is: L, D, E, F, H, I, M, N, P, Q, R, S, or V;
   [0600] (iii) X3 is: N, A, D, E, G, H, I, K, Q, S, T, V, or Y;
   [0601] (iv) X4 is: G, A, C, D, E, P, Q, R, S, T, V, or W;
   [0602] (v) X5 is: A, C, D, E, F, G, H, I, K, N, P, Q, R, S, T, V, W, or Y;
   [0603] (vi) X6 is: V, A, C, D, E, F, G, H, I, K, L, M, N, Q, R, S, T, or Y;
   [0604] (vii) X7 is: H, A, D, E, G, I, K, L, M, N, P, Q, R, S, T, V, or Y;
   [0605] (viii) X8 is: L, A, D, E, F, G, H, I, K, M, N, P, Q, R, S, T, V, or Y;
   [0606] (ix) X9 is: Y, A, C, D, E, F, G, H, I, K, L, M, N, Q, R, S, T, V, or W;
   [0607] (x) X10 is: A, C, D, E, F, G, H, I, K, L, N, P, Q, R, S, T, V, or; Y;
   [0608] (xi) X11 is: Q, A, D, E, H, K, L, P, R, or T;
   [0609] (xii) X12 is: A, D, E, G, H, L, N, P, Q, R, S, T, or V;
   [0610] (xiii) X13 is: Q, E, H, K, L, P, R, or T;
   [0611] (xiv) X14 is: T, A, C, D, E, F, G, H, I, K, L, M, N, P, Q, R, S, V, W, or Y;
   [0612] (xv) X15 is: G, A, C, D, E, F, H, I, K, L, M, N, P, Q, R, S, T, V, W, or Y;
   [0613] (xvi) X16 is: W, A, C, D, E, F, G, H, I, K, L, M, N, P, Q, R, S, T, V, or Y;
   [0614] (xvii) X17 is: V, A, D, E, F, G, H, I, or L;
   [0615] (xviii) X18 is: Q, E, H, K, L, P, or R; and/or
   [0616] (xix) X19 is: N, D, H, I, K, P, S, T, or Y.
[0617] 265. The isolated AAV particle of embodiment 264, wherein:
   [0618] (i) X1 is: P, Q, A, S, T, R, H, L, or K;
   [0619] (ii) X2 is: L, I, V, H, or R;
   [0620] (iii) X3 is: N, D, K, Y, or I;
   [0621] (iv) X4 is: G, S, R, C, or A;
   [0622] (v) X5 is: A, S, G, N, T, D, Y, Q, V, or C;
   [0623] (vi) X6 is: V, I, L, A, F, D, or G;
   [0624] (vii) X7 is: H, N, Q, P, D, L, R, or Y;
   [0625] (viii) X8 is: L, H, V, I, or R;
   [0626] (ix) X9 is Y;
   [0627] (x) X10 is: A, D, S, or T;
   [0628] (xi) X11 is: Q, K, H, L, P, or R;
   [0629] (xii) X12 is: A, P, E, or S;
   [0630] (xiii) X13 is: Q, K, H, or P;
   [0631] (xiv) X14 is: L, T, V, S, R, I, A, N, C, P, Q, M, or K;
   [0632] (xv) X15 is: S, G, M, T, A, K, Q, V, I, R, N, P, L, H, Y;
   [0633] (xvi) X16 is: P, W, S, K, Q, G, C, R, A, N, T, V, M, H, L, E, F, or Y;
   [0634] (xvii) X17 is: V, D, F, A, E, L, G, or I;
   [0635] (xviii) X18 is: Q, R, P, K, L, H, or E; and/or
   [0636] (xix) X19 is: N, H, D, S, T, P, K, I, or Y.
[0637] 266. The isolated AAV particle of embodiment 264 or 265, wherein:
   [0638] (i) X1 is: P, A, S, Q, or T;
   [0639] (ii) X2 is L or I;
   [0640] (iii) X3 is N or D;
   [0641] (iv) X4 is G or S;
   [0642] (v) X5 is: A, S, G, N, or T;
   [0643] (vi) X6 is V;
   [0644] (vii) X7 is H;
   [0645] (viii) X8 is: L, H, V, or I
   [0646] (ix) X9 is Y;
   [0647] (x) X10 is: A, D, or S;
   [0648] (xi) X11 is Q or K;
   [0649] (xii) X12 is A or P;
   [0650] (xiii) X13 is Q;
   [0651] (xiv) X14 is: L, T, V, S, R, I, A, N, C, P, Q, or M;
   [0652] (xv) X15 is: S, G, M, T, A, K, Q, V, I, R, N, P, L, or H;
   [0653] (xvi) X16 is: P, W, S, K, Q, G, C, R, A, N, T, V, M, H, L, or E;
   [0654] (xvii) X17 is: V, D, F, A, E, L, or G;
   [0655] (xviii) X18 is: Q, R, P, K, or L; and/or
   [0656] (xix) X19 is: N, H, D, S, T, P, K, or I.
[0657] 267. The isolated AAV particle of any one of embodiments 264-266, wherein X1-X2-X3-X4-X5-X6-X7-X8-X9-X10-X11-X12-X13-X14-X15-X16-X17-X18-X19 is present immediately subsequent to position 586, numbered according to SEQ ID NO: 5, 8, 138, or 3636.
[0658] 268. The isolated AAV particle of any one of embodiments 264-267, wherein X1-X2-X3-X4-X5-X6-X7-X8-X9-X10-X11-X12-X13-X14-X15-X16-X17-X18-X19 replaces positions 587-598 (e.g., A587, Q588, A589, Q590, A591, Q592, T593, G594, W595, V596, Q597, N598), numbered according to SEQ ID NO: 138.
[0659] 269. The isolated AAV particle of any one of embodiments 264-268, wherein X1-X2-X3-X4-X5-X6-X7-X8-X9-X10-X11-X12-X13-X14-X15-X16-X17-X18-X19 is present immediately subsequent to position 586 and replaces positions 587-598 (e.g., A587, Q588, A589, Q590, A591, Q592, T593, G594, W595, V596, Q597, N598), numbered according to SEQ ID NO: 138.
[0660] 270. The isolated AAV particle of any one of embodiments 264-269, wherein X1-X2-X3-X4-X5-X6-X7-X8-X9-X10-X11-X12-X13-X14-X15-X16-X17-X18-X19 corresponds to positions 587-605 of SEQ ID NO: 5, 8, or 3636.
[0661] 271. An isolated, e.g., recombinant, AAV particle comprising an AAV capsid variant and a nucleic acid comprising a transgene encoding an antibody molecule which binds to tau (e.g., human tau), wherein the AAV capsid variant comprises:
   [0662] (a) the amino acid sequence of any one of SEQ ID NOs: 139-1138;
   [0663] (b) an amino acid sequence comprising at least 3, 4, 5, 6, 7, 8, 9, 10, 11, 12, 13, 14, 15, 16, 17, or 18 consecutive amino acids from any one of SEQ ID NOs: 139-1138; or
   [0664] (c) an amino acid sequence comprising at least one, two, or three but no more than four different amino acids, relative to the amino acid sequence of any one of SEQ ID NOs: 139-1138;
   [0665] (d) an amino sequence comprising at least one, two, or three but no more than four modifications, e.g., substitutions (e.g., conservative substitutions), insertions, or deletions, relative to the amino acid sequence of any one of SEQ ID NOs: 139-1138;
   [0666] optionally wherein the AAV capsid variant does not comprise the amino acid sequence of TGW at positions 593-595, relative to a reference sequence numbered according to the amino acid sequence of SEQ ID NO: 138.
[0667] 272. An isolated, e.g., recombinant, AAV particle comprising an AAV capsid variant and a nucleic acid comprising a transgene encoding an antibody molecule which binds to tau (e.g., human tau), wherein the AAV capsid variant comprises:
   [0668] (a) the amino acid sequence of any one of SEQ ID NOs: 139-476;
   [0669] (b) an amino acid sequence comprising at least 3, 4, 5, 6, 7, 8, 9, 10, 11, 12, 13, 14, 15, 16, 17, or 18 consecutive amino acids from any one of SEQ ID NOs: 139-476; or
   [0670] (c) an amino acid sequence comprising at least one, two, or three but no more than four different amino acids, relative to the amino acid sequence of any one of SEQ ID NOs: 139-476;
   [0671] (d) an amino sequence comprising at least one, two, or three but no more than four modifications, e.g., substitutions (e.g., conservative substitutions), insertions, or deletions, relative to the amino acid sequence of any one of SEQ ID NOs: 139-476;
   [0672] optionally wherein the AAV capsid variant does not comprise the amino acid sequence of TGW at positions 593-595, relative to a reference sequence numbered according to the amino acid sequence of SEQ ID NO: 138.
[0673] 273. An isolated, e.g., recombinant, AAV particle comprising an AAV capsid variant and a nucleic acid comprising a transgene encoding an antibody molecule which binds to tau (e.g., human tau), wherein the AAV capsid variant comprises:
   [0674] (a) the amino acid sequence of any one of SEQ ID NOs: 140, 142-144, 148-150, 154-158, 160, 161, 163, 165, 166, 168, 170, 171, 173-175, 177-179, 181, 182, 184-197, 199-214, 218-222, 224, 225, 227-241, 243-253, 255-262, 265, 267, 268, 270, 271, 273, 274, 276, 277, 279, 282, 284-286, 288-296, 300-310, 312, 315, 317, 318, 320-323, 326, 327, 331, 332, 334, 336, 337, 339, 340, 341, 343, 344, 346, 349, 351, 352, 356-363, 365-367, 369, 370, 372-376, 378-381, 383-389, 392, 393, 395, 397-400, 404, 407, 408, 411, 412, 415, 417, 420-430, 432, 433, 435-438, 441, 442, 446-448, 451-453, 456, 458, 460, 461, 465, 467-469, 471-473, 475, 476, 478, 480, 482, 485, 488, 490, 492, 493, 495, 498, 500-503, 505, 507, 509, 510, 517, 522-526, 528, 535-538, 540, 543-545, 547, 551, 552, 557, 559, 561, 564, 568, 570, 572-574, 577, 585-588, 592-594, 596, 601, 602, 605, 612, 616, 619, 622, 624, 627, 628, 635, 640, 641, 646, 658, 660, 665, 666, 675, 678, 680, 683, 684, 689, 693, 695, 707, 711, 718, 719, 724, 727, 735, 740, 748, 751, 755, 758, 759, 765, 766, 768, 778, 783, 787, 791, 797, 801, 804, 817, 821, 832, 841, 852, 856, 861, 862, 864, 894, 906, 911, 913, 924, 929, 945, 959, 961, 970, 975, 980, 983, 988, 992, 1009, 1015, 1019, 1027, 1032, 1036, 1038, 1047, 1051, 1061, 1077, 1081, 1095, or 1113;
   [0675] (b) an amino acid sequence comprising at least 3, 4, 5, 6, 7, 8, 9, 10, 11, 12, 13, 14, 15, 16, 17, or 18 consecutive amino acids from any one of the amino acid sequences in (i); or
   [0676] (c) an amino acid sequence comprising at least one, two, or three but no more than four different amino acids, relative to the amino acid sequence of any one of the amino acid sequences in (i);
   [0677] (d) an amino sequence comprising at least one, two, or three but no more than four modifications, e.g., substitutions (e.g., conservative substitutions), insertions, or deletions, relative to the amino acid sequence of any one of the amino acid sequences in (i);
   [0678] optionally wherein the AAV capsid variant does not comprise the amino acid sequence of TGW at positions 593-595, relative to a reference sequence numbered according to the amino acid sequence of SEQ ID NO: 138.
[0679] 274. The isolated AAV particle of embodiment 271, wherein the AAV capsid variant comprises an amino acid sequence comprising at least 4, 5, 6, 7, 8, 9, 10, 11, 12, 13, 14, 15, 16, 17, or 18 consecutive amino acids from any one of SEQ ID NOs: 139-1138.
[0680] 275. The AAV capsid variant of any one of embodiments 271, 272, or 274, wherein the AAV capsid variant comprises an amino acid sequence comprising at least 4, 5, 6, 7, 8, 9, 10, 11, 12, 13, 14, 15, 16, 17, or 18 consecutive amino acids from SEQ ID NO: 314.
[0681] 276. The AAV capsid variant of any one of embodiments 271 or 274, wherein the AAV capsid variant comprises an amino acid sequence comprising at least 4, 5, 6, 7, 8, 9, 10, 11, 12, 13, 14, 15, 16, 17, or 18 consecutive amino acids from SEQ ID NO: 566.
[0682] 277. The isolated AAV particle of embodiment 271 or 272, comprising an amino acid sequence comprising at least 4, 5, 6, 7, 8, 9, 10, 11, 12, 13, 14, 15, 16, 17, or 18 consecutive amino acids from any one of SEQ ID NOs: 139-476.
[0683] 278. The isolated AAV particle of embodiment 271 or 273, wherein the AAV capsid variant comprises an amino acid sequence comprising at least 4, 5, 6, 7, 8, 9, 10, 11, 12, 13, 14, 15, 16, 17, or 18 consecutive amino acids from any one of SEQ ID NOs: 140, 142-144, 148-150, 154-158, 160, 161, 163, 165, 166, 168, 170, 171, 173-175, 177-179, 181, 182, 184-197, 199-214, 218-222, 224, 225, 227-241, 243-253, 255-262, 265, 267, 268, 270, 271, 273, 274, 276, 277, 279, 282, 284-286, 288-296, 300-310, 312, 315, 317, 318, 320-323, 326, 327, 331, 332, 334, 336, 337, 339, 340, 341, 343, 344, 346, 349, 351, 352, 356-363, 365-367, 369, 370, 372-376, 378-381, 383-389, 392, 393, 395, 397-400, 404, 407, 408, 411, 412, 415, 417, 420-430, 432, 433, 435-438, 441, 442, 446-448, 451-453, 456, 458, 460, 461, 465, 467-469, 471-473, 475, 476, 478, 480, 482, 485, 488, 490, 492, 493, 495, 498, 500-503, 505, 507, 509, 510, 517, 522-526, 528, 535-538, 540, 543-545, 547, 551, 552, 557, 559, 561, 564, 568, 570, 572-574, 577, 585-588, 592-594, 596, 601, 602, 605, 612, 616, 619, 622, 624, 627, 628, 635, 640, 641, 646, 658, 660, 665, 666, 675, 678, 680, 683, 684, 689, 693, 695, 707, 711, 718, 719, 724, 727, 735, 740, 748, 751, 755, 758, 759, 765, 766, 768, 778, 783, 787, 791, 797, 801, 804, 817, 821, 832, 841, 852, 856, 861, 862, 864, 894, 906, 911, 913, 924, 929, 945, 959, 961, 970, 975, 980, 983, 988, 992, 1009, 1015, 1019, 1027, 1032, 1036, 1038, 1047, 1051, 1061, 1077, 1081, 1095, 1113.
[0684] 279. The isolated AAV particle of embodiment 271, wherein the AAV capsid variant comprises an amino acid sequence comprising at least one, two, or three but no more than four different amino acids relative to the amino acid sequence of any one of SEQ ID NOs: 139-1138.
[0685] 280. The isolated AAV particle of embodiment 271 or 272, wherein the AAV capsid variant comprises an amino acid sequence comprising at least one, two, or three but no more than four different amino acids relative to the amino acid sequence of any one of SEQ ID NOs: 139-476.
[0686] 281. The isolated AAV particle of embodiment 271 or 273, wherein the AAV capsid variant comprises an amino acid sequence comprising at least one, two, or three but no more than four different amino acids relative to the amino acid sequence of any one of SEQ ID NOs: 140, 142-144, 148-150, 154-158, 160, 161, 163, 165, 166, 168, 170, 171, 173-175, 177-179, 181, 182, 184-197, 199-214, 218-222, 224, 225, 227-241, 243-253, 255-262, 265, 267, 268, 270, 271, 273, 274, 276, 277, 279, 282, 284-286, 288-296, 300-310, 312, 315, 317, 318, 320-323, 326, 327, 331, 332, 334, 336, 337, 339, 340, 341, 343, 344, 346, 349, 351, 352, 356-363, 365-367, 369, 370, 372-376, 378-381, 383-389, 392, 393, 395, 397-400, 404, 407, 408, 411, 412, 415, 417, 420-430, 432, 433, 435-438, 441, 442, 446-448, 451-453, 456, 458, 460, 461, 465, 467-469, 471-473, 475, 476, 478, 480, 482, 485, 488, 490, 492, 493, 495, 498, 500-503, 505, 507, 509, 510, 517, 522-526, 528, 535-538, 540, 543-545, 547, 551, 552, 557, 559, 561, 564, 568, 570, 572-574, 577, 585-588, 592-594, 596, 601, 602, 605, 612, 616, 619, 622, 624, 627, 628, 635, 640, 641, 646, 658, 660, 665, 666, 675, 678, 680, 683, 684, 689, 693, 695, 707, 711, 718, 719, 724, 727, 735, 740, 748, 751, 755, 758, 759, 765, 766, 768, 778, 783, 787, 791, 797, 801, 804, 817, 821, 832, 841, 852, 856, 861, 862, 864, 894, 906, 911, 913, 924, 929, 945, 959, 961, 970, 975, 980, 983, 988, 992, 1009, 1015, 1019, 1027, 1032, 1036, 1038, 1047, 1051, 1061, 1077, 1081, 1095, or 1113.
[0687] 282. The isolated AAV particle of embodiment 271, wherein the AAV capsid variant comprises an amino acid sequence comprising at least one, two, or three but no more than four modifications, e.g., substitutions (e.g., conservative substitutions), insertions, or deletions, relative to the amino acid sequence of SEQ ID NOs: 139-1138.
[0688] 283. The isolated AAV particle of embodiment 271 or 272, wherein the AAV capsid variant comprises an amino acid sequence comprising at least one, two, or three but no more than four modifications, e.g., substitutions (e.g., conservative substitutions), insertions, or deletions, relative to the amino acid sequence of SEQ ID NOs: 139-476.
[0689] 284. The AAV capsid variant of any one of embodiments 271, 272, 274, 275, or 283, wherein the AAV capsid variant comprises:
   [0690] (i) an amino acid sequence comprising at least one, two, or three but no more than four different amino acids relative to the amino acid sequence of SEQ ID NO: 314; or
   [0691] (ii) an amino acid sequence comprising at least one, two, or three but no more than four modifications, e.g., substitutions (e.g., conservative substitutions), insertions, or deletions, relative to SEQ ID NO: 314.
[0692] 285. The AAV capsid variant of any one of embodiments 271, 274, 276, or 283, wherein the AAV capsid variant comprises:
   [0693] (i) an amino acid sequence comprising at least one, two, or three but no more than four different amino acids relative to the amino acid sequence of SEQ ID NO: 566; or
   [0694] (ii) an amino acid sequence comprising at least one, two, or three but no more than four modifications, e.g., substitutions (e.g., conservative substitutions), insertions, or deletions, relative to SEQ ID NO: 566.
[0695] 286. The isolated AAV particle of embodiment 271 or 273, wherein the AAV capsid variant comprises an amino acid sequence comprising at least one, two, or three but no more than four modifications, e.g., substitutions (e.g., conservative substitutions), insertions, or deletions, relative to any of SEQ ID NOs: 140, 142-144, 148-150, 154-158, 160, 161, 163, 165, 166, 168, 170, 171, 173-175, 177-179, 181, 182, 184-197, 199-214, 218-222, 224, 225, 227-241, 243-253, 255-262, 265, 267, 268, 270, 271, 273, 274, 276, 277, 279, 282, 284-286, 288-296, 300-310, 312, 315, 317, 318, 320-323, 326, 327, 331, 332, 334, 336, 337, 339, 340, 341, 343, 344, 346, 349, 351, 352, 356-363, 365-367, 369, 370, 372-376, 378-381, 383-389, 392, 393, 395, 397-400, 404, 407, 408, 411, 412, 415, 417, 420-430, 432, 433, 435-438, 441, 442, 446-448, 451-453, 456, 458, 460, 461, 465, 467-469, 471-473, 475, 476, 478, 480, 482, 485, 488, 490, 492, 493, 495, 498, 500-503, 505, 507, 509, 510, 517, 522-526, 528, 535-538, 540, 543-545, 547, 551, 552, 557, 559, 561, 564, 568, 570, 572-574, 577, 585-588, 592-594, 596, 601, 602, 605, 612, 616, 619, 622, 624, 627, 628, 635, 640, 641, 646, 658, 660, 665, 666, 675, 678, 680, 683, 684, 689, 693, 695, 707, 711, 718, 719, 724, 727, 735, 740, 748, 751, 755, 758, 759, 765, 766, 768, 778, 783, 787, 791, 797, 801, 804, 817, 821, 832, 841, 852, 856, 861, 862, 864, 894, 906, 911, 913, 924, 929, 945, 959, 961, 970, 975, 980, 983, 988, 992, 1009, 1015, 1019, 1027, 1032, 1036, 1038, 1047, 1051, 1061, 1077, 1081, 1095, or 1113.
[0696] 287. The isolated AAV particle of any one of embodiments 271-286, wherein 4, 5, 6, 7, 8, or 9 consecutive amino acids is not PLNG (SEQ ID NO: 3678), PLNGA (SEQ ID NO: 3679), PLNGAV (SEQ ID NO: 3680), PLNGAVHL (SEQ ID NO: 3682), and/or PLNGAVHLY (SEQ ID NO: 3648).
[0697] 288. The isolated AAV particle of any one of embodiments 271, 274, 279, or 282, wherein the AAV capsid variant comprises the amino acid sequence of any one of SEQ ID NOs: 139-1138.
[0698] 289. The isolated AAV particle of any one of embodiments 271, 274, 275, 279, or 282, wherein the AAV capsid variant comprises the amino acid sequence of SEQ ID NO: 314.
[0699] 290. The isolated AAV particle of any one of embodiments 271, 274, 276, 279, or 282, wherein the AAV capsid variant comprises the amino acid sequence of SEQ ID NO: 566.
[0700] 291. The isolated AAV particle of any one of embodiments 271, 272, 275, 277, 279, 280, 282, or 283, wherein the AAV capsid variant comprises the amino acid sequence of any one of SEQ ID NOs: 139-476.
[0701] 292. The isolated AAV particle of any one of embodiments 271, 272, 275, 278, 279, 281, 282, or 284, wherein the AAV capsid variant comprises the amino acid sequence of any one of SEQ ID NOs: 140, 142-144, 148-150, 154-158, 160, 161, 163, 165, 166, 168, 170, 171, 173-175, 177-179, 181, 182, 184-197, 199-214, 218-222, 224, 225, 227-241, 243-253, 255-262, 265, 267, 268, 270, 271, 273, 274, 276, 277, 279, 282, 284-286, 288-296, 300-310, 312, 315, 317, 318, 320-323, 326, 327, 331, 332, 334, 336, 337, 339, 340, 341, 343, 344, 346, 349, 351, 352, 356-363, 365-367, 369, 370, 372-376, 378-381, 383-389, 392, 393, 395, 397-400, 404, 407, 408, 411, 412, 415, 417, 420-430, 432, 433, 435-438, 441, 442, 446-448, 451-453, 456, 458, 460, 461, 465, 467-469, 471-473, 475, 476, 478, 480, 482, 485, 488, 490, 492, 493, 495, 498, 500-503, 505, 507, 509, 510, 517, 522-526, 528, 535-538, 540, 543-545, 547, 551, 552, 557, 559, 561, 564, 568, 570, 572-574, 577, 585-588, 592-594, 596, 601, 602, 605, 612, 616, 619, 622, 624, 627, 628, 635, 640, 641, 646, 658, 660, 665, 666, 675, 678, 680, 683, 684, 689, 693, 695, 707, 711, 718, 719, 724, 727, 735, 740, 748, 751, 755, 758, 759, 765, 766, 768, 778, 783, 787, 791, 797, 801, 804, 817, 821, 832, 841, 852, 856, 861, 862, 864, 894, 906, 911, 913, 924, 929, 945, 959, 961, 970, 975, 980, 983, 988, 992, 1009, 1015, 1019, 1027, 1032, 1036, 1038, 1047, 1051, 1061, 1077, 1081, 1095, or 1113.
[0702] 293. The isolated AAV particle of any one of embodiments 1-292, wherein the AAV capsid variant comprises an amino acid sequence comprising at least 5, 6, 7, 8, or 9 consecutive amino acids from the amino acid sequence of PLNGAVHLY (SEQ ID NO: 3648), wherein:
   [0703] (i) the 5 consecutive amino acids comprise PLNGA (SEQ ID NO: 3679);
   [0704] (ii) the 6 consecutive amino acids comprise PLNGAV (SEQ ID NO: 3680);
   [0705] (iii) the 7 consecutive amino acids comprise PLNGAVH (SEQ ID NO: 3681);
   [0706] (iv) the 8 consecutive amino acids comprise PLNGAVHL (SEQ ID NO: 3682); or
   [0707] (v) the 9 consecutive amino acids comprise PLNGAVHLY (SEQ ID NO: 3648),
   [0708] wherein the AAV capsid variant comprises: (a) a VP1 protein comprising the amino acid sequence of SEQ ID NO: 138 or SEQ ID NO: 5, 8, or 3636; (b) a VP2 protein comprising the amino acid sequence of positions 138-736 of SEQ ID NO: 138 or positions 138-743 of SEQ ID NO: 5, 8, or 3636; (c) a VP3 protein comprising the amino acid sequence of positions 203-736 of SEQ ID NO: 138 or positions 203-743 of SEQ ID NO: 5, 8, or 3636; or (d) an amino acid sequence with at least 90% (e.g., at least about 95, 96, 97, 98, or 99%) sequence identity to any of the amino acid sequences in (a)-(c).
[0709] 294. The isolated AAV particle of any one of embodiments 1-293, wherein the AAV capsid variant comprises an amino acid sequence comprising at least 5, 6, 7, 8, or 9 consecutive amino acids from the amino acid sequence of PLNGAVHLY (SEQ ID NO: 3648), wherein:
   [0710] (i) the 5 consecutive amino acids comprise PLNGA (SEQ ID NO: 3679);
   [0711] (ii) the 6 consecutive amino acids comprise PLNGAV (SEQ ID NO: 3680);
   [0712] (iii) the 7 consecutive amino acids comprise PLNGAVH (SEQ ID NO: 3681);
   [0713] (iv) the 8 consecutive amino acids comprise PLNGAVHL (SEQ ID NO: 3682); or
   [0714] (v) the 9 consecutive amino acids comprise PLNGAVHLY (SEQ ID NO: 3648),
   [0715] wherein the AAV capsid variant comprises the amino acid sequence of any one of SEQ ID NOs: 5, 8, or 3636 or an amino acid sequence with at least 90% (e.g., at least about 95, 96, 97, 98, or 99%) sequence identity to any one of SEQ ID NOs: 5, 8, or 3636.
[0716] 295. The isolated AAV particle of any one of embodiments 1-294, wherein the AAV capsid variant comprises one or two, but no more than three different amino acids (e.g., substitutions, e.g., conservative substitutions) relative to the amino acid sequence of PLNGAVHLY (SEQ ID NO: 3648), wherein the AAV capsid variant comprises:
   [0717] (a) a VP1 protein comprising the amino acid sequence of SEQ ID NO: 5, 8, 138, or 3636;
   [0718] (b) a VP2 protein comprising the amino acid sequence of positions 138-736 of SEQ ID NO: 138 or positions 138-743 of SEQ ID NO: 5, 8, or 3636;
   [0719] (c) a VP3 protein comprising the amino acid sequence of positions 203-736 of SEQ ID NO: 138 or positions 203-743 of SEQ ID NO: 5, 8, or 3636; or
   [0720] (d) an amino acid sequence with at least 90% (e.g., at least about 95, 96, 97, 98, or 99%) sequence identity to any of the amino acid sequences in (a)-(c).
[0721] 296. The isolated AAV particle of any one of embodiments 1-295, wherein the AAV capsid variant comprises one or two, but no more than three different amino acids (e.g., substitutions, e.g., conservative substitutions) relative to the amino acid sequence of PLNGAVHLY (SEQ ID NO: 3648), wherein the AAV capsid variant comprises the amino acid sequence of any one of SEQ ID NOs: 5, 8, 138, or 3636 or an amino acid sequence with at least 90% (e.g., at least about 95, 96, 97, 98, or 99%) sequence identity to any one of SEQ ID NOs: 5, 8, 138, or 3636.
[0722] 297. The isolated AAV particle of any one of embodiments 293-296, wherein the amino acid sequence is present immediately subsequent to position 586, numbered according to any one of SEQ ID NO: 5, 8, 138, or 3636, optionally wherein the amino acid replaces positions 587 and 588 (e.g., A587 and Q588), numbered according to SEQ ID NO: 138.
[0723] 298. The isolated AAV particle of any one of embodiments 293-297, wherein the amino acid sequence corresponds to positions 587-595 of SEQ ID NO: 5, 8, or 3636.
[0724] 299. The isolated AAV particle of any one of embodiments 1-298, wherein the AAV capsid variant comprises one or two, but no more than three different amino acids (e.g., substitutions, e.g. conservative substitutions) relative to the amino acid sequence of PLNGAVHLYAQAQLSPVKN (SEQ ID NO: 566), wherein the AAV capsid variant comprises:
   [0725] (a) a VP1 protein comprising the amino acid sequence of SEQ ID NO: 5, 8, 138, or 3636;
   [0726] (b) a VP2 protein comprising the amino acid sequence of positions 138-736 of SEQ ID NO: 138 or positions 138-743 of SEQ ID NO: 5, 8, or 3636;
   [0727] (c) a VP3 protein comprising the amino acid sequence of positions 203-736 of SEQ ID NO: 138 or positions 203-743 of SEQ ID NO: 5, 8, or 3636; or
   [0728] (d) an amino acid sequence with at least 90% (e.g., at least about 95, 96, 97, 98, or 99%) sequence identity to any of the amino acid sequences in (a)-(c).
[0729] 300. The isolated AAV particle of any one of embodiments 1-299, wherein the AAV capsid variant comprises one or two, but no more than three different amino acids (e.g., substitutions, e.g., conservative substitutions) relative to the amino acid sequence of PLNGAVHLYAQAQLSPVKN (SEQ ID NO: 566), wherein the AAV capsid variant comprises the amino acid sequence of any one of SEQ ID NOs: 5, 8, 138, or 3636 or an amino acid sequence with at least 90% (e.g., at least about 95, 96, 97, 98, or 99%) sequence identity to any one of SEQ ID NOs: 5, 8, 138, or 3636.
[0730] 301. The isolated AAV particle of any one of embodiments 1-298, wherein the AAV capsid variant comprises one or two, but no more than three different amino acids (e.g., substitutions, e.g., conservative substitutions) relative to the amino acid sequence of PLNGAVHLYAQAQTGWVPN (SEQ ID NO: 314), wherein the AAV capsid variant comprises:
   [0731] (a) a VP1 protein comprising the amino acid sequence of SEQ ID NO: 5, 8, 138, or 3636;
   [0732] (b) a VP2 protein comprising the amino acid sequence of positions 138-736 of SEQ ID NO: 138 or positions 138-743 of SEQ ID NO: 5, 8, or 3636;
   [0733] (c) a VP3 protein comprising the amino acid sequence of positions 203-736 of SEQ ID NO: 138 or positions 203-743 of SEQ ID NO: 5, 8, or 3636; or
   [0734] (d) an amino acid sequence with at least 90% (e.g., at least about 95, 96, 97, 98, or 99%) sequence identity to any of the amino acid sequences in (a)-(c).
[0735] 302. The isolated AAV particle of any one of embodiments 1-298 or 301, wherein the AAV capsid variant comprises one or two, but no more than three different amino acids (e.g., substitutions, e.g., conservative substitutions) relative to the amino acid sequence of PLNGAVHLYAQAQTGWVPN (SEQ ID NO: 314), wherein the AAV capsid variant comprises the amino acid sequence of any one of SEQ ID NOs: 5, 8, 138, or 3636 or an amino acid sequence with at least 90% (e.g., at least about 95, 96, 97, 98, or 99%) sequence identity to any one of SEQ ID NOs: 5, 8, 138, or 3636.
[0736] 303. The isolated AAV particle of any one of embodiments 299-302, wherein the amino acid sequence is present immediately subsequent to position 586, numbered according to any one of SEQ ID NO: 5, 8, 138, or 3636, optionally wherein the amino acid replaces positions 587-598, numbered according to SEQ ID NO: 138.
[0737] 304. The isolated AAV particle of any one of embodiments 299-303, wherein the amino acid sequence corresponds to positions 587-605 of SEQ ID NO: 5 or 8.
[0738] 305. The isolated AAV particle of any one of the preceding embodiments, wherein the amino acid sequence is present in loop VIII.
[0739] 306. The isolated AAV particle of any one of embodiments 3-5 or 271-305, wherein the amino acid sequence is present immediately subsequent to position 586, 587, 588, 589, 590, 591, 592, 593, 594, or 595, relative to a reference sequence numbered according to the amino acid sequence of SEQ ID NO: 138.
[0740] 307. The isolated AAV particle of any one of embodiments 271-306, wherein the amino acid sequence is present immediately subsequent to position 586, relative to a reference sequence numbered according to the amino acid sequence of SEQ ID NO: 138.
[0741] 308. The isolated AAV particle of any one of embodiments 271-307, wherein the amino acid sequence replaces positions 587 and 588 (e.g., A587 and Q588), numbered according to SEQ ID NO: 138.
[0742] 309. The isolated AAV particle of any one of embodiments 271-306, wherein the amino acid sequence is present immediately subsequent to position 588, relative to a reference sequence numbered according to the amino acid sequence of SEQ ID NO: 138.
[0743] 310. The isolated AAV particle of any one of embodiments 271-306, wherein the amino acid sequence is present immediately subsequent to position 592, relative to a reference sequence numbered according to the amino acid sequence of SEQ ID NO: 138.
[0744] 311. The isolated AAV particle of any one of embodiments 271-306, wherein the amino acid sequence is present immediately subsequent to position 595, relative to a reference sequence numbered according to the amino acid sequence of SEQ ID NO: 138.
[0745] 312. The isolated AAV particle of any one of embodiments 271-311, wherein the AAV capsid variant further comprises:
   [0746] (i) one, two, three, or all of an amino acid other than A at position 589, an amino acid other than Q at position 590, an amino acid other than A at position 591, and/or an amino acid other than Q at position 592, relative to a reference sequence numbered according to the amino acid sequence of SEQ ID NO: 138;
   [0747] (ii) one, two, or all of an amino acid other than T at position 593, an amino acid other than G at position 594, and/or an amino acid other than W at position 595, relative to a reference sequence numbered according to the amino acid sequence of SEQ ID NO: 138
   [0748] (iii) one, two, or all of an amino acid other than V at position 596, an amino acid other than Q at position 597, and/or an amino acid other than N at position 598, relative to a reference sequence numbered according to the amino acid sequence of SEQ ID NO: 138.
[0749] 313. The isolated AAV particle of any one of the preceding embodiments, wherein the AAV capsid variant further comprises an amino acid other than A at position 587 and an amino acid other than Q at position 588, numbered according to the amino acid sequence of SEQ ID NO: 138.
[0750] 314. The isolated AAV particle of any one of embodiments 271-313, wherein the AAV capsid variant comprises the amino acid P at position 587 the amino acid L at position 588, and the amino acid sequence NGAVHLY (SEQ ID NO: 3689), which is present immediately subsequent to position 588, corresponding to or numbered according to SEQ ID NO: 5, 8, 138, or 3636.
[0751] 315. An isolated, e.g., recombinant, AAV particle comprising an AAV capsid variant and a nucleic acid comprising a transgene encoding a transgene encoding an antibody molecule which binds to tau, wherein the AAV capsid variant comprises the amino acid P at position 587 the amino acid L at position 588, and the amino acid sequence NGAVHLY (SEQ ID NO: 3689) present immediately subsequent to position 588, corresponding to or numbered according to SEQ ID NO: 5, 8, 138, or 3636.
[0752] 316. The isolated AAV particle of any one of embodiments 271-315, wherein the AAV capsid variant further comprises:
   [0753] (i) one, two, or all of an amino acid other than T at position 593, an amino acid other than G at position 594, and/or an amino acid other than W at position 595, numbered according to the amino acid sequence of SEQ ID NO: 138; or
   [0754] (ii) one, two, or all of an amino acid other than T at position 600, an amino acid other than G at position 601, and/or an amino acid other than W at position 602, numbered according to the amino acid sequence of SEQ ID NO: 5, 8, or 3636.
[0755] 317. The isolated AAV particle of any one of embodiments 271-316, wherein the AAV capsid variant further comprises:
   [0756] (i) an amino acid other than T at position 593, an amino acid other than G at position 594, and an amino acid other than W at position 595, numbered according to the amino acid sequence of SEQ ID NO: 138; or
   [0757] (ii) an amino acid other than T at position 600, an amino acid other than G at position 601, and an amino acid other than W at position 602, numbered according to the amino acid sequence of SEQ ID NO: 5, 8, 3636.
[0758] 318. The isolated AAV particle of any one of embodiments 271-317, wherein the AAV capsid variant further comprises:
   [0759] (i) one, two, or all of the amino acid L at position 593, the amino acid S at position 594, and/or the amino acid P at position 595, numbered according to the amino acid sequence of SEQ ID NO: 138;
   [0760] (ii) one, two, or all of the amino acid L at position 600, the amino acid S at position 601, and/or the amino acid P at position 602, numbered according to the amino acid sequence of SEQ ID NO: 5, 8, or 3636.
[0761] 319. The isolated AAV particle of any one of embodiments 271-318, wherein the AAV capsid variant further comprises:
   [0762] (i) the amino acid L at position 593, the amino acid S at position 594, and the amino acid P at position 595, numbered according to the amino acid sequence of SEQ ID NO: 138; or
   [0763] (ii) the amino acid L at position 600, the amino acid S at position 601, and the amino acid P at position 602, numbered according to the amino acid sequence of SEQ ID NO: 5, 8, or 3636.
[0764] 320. The isolated AAV particle of any one of embodiments 271-319, wherein the AAV capsid variant further comprises:
   [0765] (i) one, two, or all of an amino acid other than V at position 596, an amino acid other than Q at position 597, and/or an amino acid other than N at position 598, numbered according to the amino acid sequence of SEQ ID NO: 138;
   [0766] (ii) one, two, or all of an amino acid other than V at position 603, an amino acid other than Q at position 604, and/or an amino acid other than N at position 605, numbered according to the amino acid sequence of SEQ ID NO: 5, 8, 3636.
[0767] 321. The isolated AAV particle of any one of embodiments 271-320, wherein the AAV capsid variant further comprises an amino acid other than Q at position 597 numbered according to the amino acid sequence of SEQ ID NO: 138 or at position 604 numbered according to SEQ ID NO: 5, 8, or 3636.
[0768] 322. The isolated AAV particle of any one of embodiments 271-321, wherein the AAV capsid variant further comprises the amino acid P at position 597 numbered according to the amino acid sequence of SEQ ID NO: 138 or at position 604 numbered according to SEQ ID NO: 5, 8, or 3636.
[0769] 323. The isolated AAV particle of any one of embodiments 271-321, wherein the AAV capsid variant further comprises the amino acid K at position 597 numbered according to the amino acid sequence of SEQ ID NO: 138 or at position 604 numbered according to SEQ ID NO: 5, 8, or 3636.
[0770] 324. The isolated AAV particle of any one of embodiments 271-321, wherein the AAV capsid variant further comprises the amino acid E or H at position 597 numbered according to the amino acid sequence of SEQ ID NO: 138 or at position 604 numbered according to SEQ ID NO: 5, 8, or 3636.
[0771] 325. The isolated AAV particle of any one of embodiments 271-321 or 323, wherein the AAV capsid variant further comprises the amino acid L at position 593, the amino acid S at position 594, the amino acid P at position 595, and the amino acid K at position 597, numbered according to the amino acid sequence of SEQ ID NO: 138.
[0772] 326. The isolated AAV particle of any one of embodiments 271-321, 323, or 325, wherein the AAV capsid variant further comprises the amino acid L at position 600, the amino acid S at position 601, the amino acid P at position 602, and the amino acid K at position 604, corresponding to or numbered according to the amino acid sequence of SEQ ID NO: 8 or 3636.
[0773] 327. The isolated AAV particle of any one of embodiments 271-321, 323, 325, or 326, wherein the AAV capsid variant comprises:
   [0774] (i) the amino acid sequence of PLNGAVHLY (SEQ ID NO: 3648), optionally where the amino acid sequence is present immediately subsequent to position 586 and replaces positions 587 and 588 (e.g., A587 and Q 588), numbered according to SEQ ID NO: 138; and
   [0775] (ii) the amino acid L at position 593, the amino acid S at position 594, the amino acid P at position 595, and the amino acid K at position 597, numbered according to the amino acid sequence of SEQ ID NO: 138.
[0776] 328. The isolated AAV particle of any one of embodiments 271-321, 323, or 325-327, wherein the AAV capsid variant comprises:
   [0777] (i) the amino acid P at position 587, the amino acid L at position 588, and the amino acid sequence NGAVHLY (SEQ ID NO: 3689), which is present immediately subsequent to position 588, numbered according to SEQ ID NO: 138; and
   [0778] (ii) the amino acid L at position 593, the amino acid S at position 594, the amino acid P at position 595, and the amino acid K at position 597, numbered according to the amino acid sequence of SEQ ID NO: 138.
[0779] 329. The isolated AAV particle of any one of embodiments 271-321, 323, or 325-328, wherein the AAV capsid variant comprises:
   [0780] (i) the amino acid P at position 587, the amino acid L at position 588, and the amino acid sequence NGAVHLY (SEQ ID NO: 3689), which is present immediately subsequent to position 588, corresponding to or numbered according to SEQ ID NO: 8 or 3636; and
   [0781] (ii) the amino acid L at position 600, the amino acid S at position 601, the amino acid P at position 602, and the amino acid K at position 604, corresponding to or numbered according to the amino acid sequence of SEQ ID NO: 8 or 3636.
[0782] 330. The isolated AAV particle of any one of embodiments 271-322, wherein the AAV capsid variant further comprises the amino acid P at position 597, numbered according to the amino acid sequence of SEQ ID NO: 138.
[0783] 331. The isolated AAV particle of any one of embodiments 271-322 or 330, wherein the AAV capsid variant further comprises the amino acid P at position 604, corresponding to or numbered according to the amino acid sequence of SEQ ID NO: 5 or 3636.
[0784] 332. The isolated AAV particle of any one of embodiments 271-322, 330, or 331, wherein the AAV capsid variant comprises:
   [0785] (i) the amino acid sequence of PLNGAVHLY (SEQ ID NO: 3648), optionally where the amino acid sequence is present immediately subsequent to position 586 and replaces positions 587 and 588 (e.g., A587 and Q 588), numbered according to SEQ ID NO: 138; and
   [0786] (ii) the amino acid P at position 597, numbered according to the amino acid sequence of SEQ ID NO: 138.
[0787] 333. The isolated AAV particle of any one of embodiments 271-322 or 330-332, wherein the AAV capsid variant comprises:
   [0788] (i) the amino acid P at position 587, the amino acid L at position 588, and the amino acid sequence NGAVHLY (SEQ ID NO: 3689), which is present immediately subsequent to position 588, numbered according to SEQ ID NO: 138; and
   [0789] (ii) the amino acid P at position 597, numbered according to the amino acid sequence of SEQ ID NO: 138.
[0790] 334. The isolated AAV particle of any one of embodiments 271-322 or 330-333, wherein the AAV capsid variant comprises:
   [0791] (i) the amino acid P at position 587, the amino acid L at position 588, and the amino acid sequence NGAVHLY (SEQ ID NO: 3689), which is present immediately subsequent to position 588, corresponding to or numbered according to SEQ ID NO: 5 or 3636; and
   [0792] (ii) the amino acid P at position 604, corresponding to or numbered according to the amino acid sequence of SEQ ID NO: 5 or 3636.
[0793] 335. An isolated, e.g., recombinant, AAV particle comprising an AAV capsid variant and a nucleic acid comprising a transgene encoding a transgene encoding an antibody molecule which binds to tau, wherein the AAV capsid variant comprises:
   [0794] (i) the amino acid sequence of PLNGAVHLY (SEQ ID NO: 3648), optionally where the amino acid sequence is present immediately subsequent to position 586 and replaces positions 587 and 588 (e.g., A587 and Q 588), numbered according to SEQ ID NO: 138; and
   [0795] (ii) the amino acid L at position 593, the amino acid S at position 594, the amino acid P at position 595, and the amino acid K at position 597, numbered according to the amino acid sequence of SEQ ID NO: 138.
[0796] 336. An isolated, e.g., recombinant, AAV particle comprising an AAV capsid variant and a nucleic acid comprising a transgene encoding a transgene encoding an antibody molecule which binds to tau, wherein the AAV capsid variant comprises:
   [0797] (i) the amino acid P at position 587, the amino acid L at position 588, and the amino acid sequence NGAVHLY (SEQ ID NO: 3689), which is present immediately subsequent to position 588, numbered according to SEQ ID NO: 138; and
   [0798] (ii) the amino acid L at position 593, the amino acid S at position 594, the amino acid P at position 595, and the amino acid K at position 597, numbered according to the amino acid sequence of SEQ ID NO: 138.
[0799] 337. An isolated, e.g., recombinant, AAV particle comprising an AAV capsid variant and a nucleic acid comprising a transgene encoding a transgene encoding an antibody molecule which binds to tau, wherein the AAV capsid variant comprises:
   [0800] (i) the amino acid P at position 587, the amino acid L at position 588, and the amino acid sequence NGAVHLY (SEQ ID NO: 3689), which is present immediately subsequent to position 588, corresponding to or numbered according to SEQ ID NO: 8 or 3636; and
   [0801] (ii) the amino acid L at position 600, the amino acid S at position 601, the amino acid P at position 602, and the amino acid K at position 604, corresponding to or numbered according to the amino acid sequence of SEQ ID NO: 8 or 3636.
[0802] 338. An isolated, e.g., recombinant, AAV particle comprising an AAV capsid variant and a nucleic acid comprising a transgene encoding a transgene encoding an antibody molecule which binds to tau, wherein the AAV capsid variant comprises:
   [0803] (i) the amino acid sequence of PLNGAVHLY (SEQ ID NO: 3648), optionally where the amino acid sequence is present immediately subsequent to position 586 and replaces positions 587 and 588 (e.g., A587 and Q 588), numbered according to SEQ ID NO: 138; and
   [0804] (ii) the amino acid P at position 597, numbered according to the amino acid sequence of SEQ ID NO: 138.
[0805] 339. An isolated, e.g., recombinant, AAV particle comprising an AAV capsid variant and a nucleic acid comprising a transgene encoding a transgene encoding an antibody molecule which binds to tau, wherein the AAV capsid variant comprises:
   [0806] (i) the amino acid P at position 587, the amino acid L at position 588, and the amino acid sequence NGAVHLY (SEQ ID NO: 3689), which is present immediately subsequent to position 588, numbered according to SEQ ID NO: 138; and
   [0807] (ii) the amino acid P at position 597, numbered according to the amino acid sequence of SEQ ID NO: 138.
[0808] 340. An isolated, e.g., recombinant, AAV particle comprising an AAV capsid variant and a nucleic acid comprising a transgene encoding a transgene encoding an antibody molecule which binds to tau, wherein the AAV capsid variant comprises:
   [0809] (i) the amino acid P at position 587, the amino acid L at position 588, and the amino acid sequence NGAVHLY (SEQ ID NO: 3689), which is present immediately subsequent to position 588, corresponding to or numbered according to SEQ ID NO: 5 or 3636; and
   [0810] (ii) the amino acid P at position 604, corresponding to or numbered according to the amino acid sequence of SEQ ID NO: 5 or 3636.
[0811] 341. The isolated AAV particle of any one of the preceding embodiments, wherein the AAV capsid variant further comprises:
   [0812] (i) a modification, e.g., an insertion, substitution (e.g., conservative substitution), and/or deletion, in loop I, II, IV, and/or VI; and/or
   [0813] (ii) a substitution at position K449, e.g., a K449R substitution, numbered according to SEQ ID NO: 138.
[0814] 342. The isolated AAV particle of any one of the preceding embodiments, wherein the AAV capsid variant comprises an amino acid sequence comprising at least one, two or three modifications, e.g., substitutions (e.g., conservative substitutions), but not more than 30, 20 or 10 modifications, e.g., substitutions (e.g., conservative substitutions), relative to the amino acid sequence of SEQ ID NO: 138.
[0815] 343. The isolated AAV particle of any one of the preceding embodiments, wherein the AAV capsid variant comprises an amino acid sequence comprising at least one, two or three, but no more than 30, 20 or 10 different amino acids relative to the amino acid sequence of SEQ ID NO: 138.
[0816] 344. The isolated AAV particle of any one of the preceding embodiments, wherein the AAV capsid variant comprises the amino acid sequence of SEQ ID NO: 138, or an amino acid sequence with at least 80% (e.g., at least about 85, 90, 95, 96, 97, 98, or 99%) sequence identity thereto.
[0817] 345. The isolated AAV particle of any one of the preceding embodiments, wherein the AAV capsid variant comprises the amino acid sequence of SEQ ID NO: 138.
[0818] 346. The isolated AAV particle of any one of the preceding embodiments, wherein the AAV capsid variant comprises an amino acid sequence encoded by the nucleotide sequence of SEQ ID NO: 137, or a sequence with at least 80% (e.g., at least about 85, 90, 95, 96, 97, 98, or 99%) sequence identity thereto.
[0819] 347. The isolated AAV particle of any one of the preceding embodiments, wherein the nucleotide sequence encoding the capsid variant comprises the nucleotide sequence of SEQ ID NO: 137, or a sequence with at least 80% (e.g., at least about 85, 90, 95, 96, 97, 98, or 99%) sequence identity thereto.
[0820] 348. The isolated AAV particle of any one of the preceding embodiments, wherein the AAV capsid variant comprises a VP1 protein, a VP2 protein, a VP3 protein, or a combination thereof.
[0821] 349. The isolated AAV particle of any one of embodiments 1-348, wherein the AAV capsid variant comprises the amino acid sequence corresponding to positions 138-743, e.g., a VP2, of SEQ ID NO: 5, 8, or 3636, or a sequence with at least 80% (e.g., at least about 85, 90, 95, 96, 97, 98, or 99%) sequence identity thereto.
[0822] 350. The isolated AAV particle of any one of embodiments 1-349, wherein the AAV capsid variant comprises the amino acid sequence corresponding to positions 203-743, e.g., a VP3, of SEQ ID NO: 5, 8, or 3636, or a sequence with at least 80% (e.g., at least about 85, 90, 95, 96, 97, 98, or 99%) sequence identity thereto.
[0823] 351. The isolated AAV particle of any one of embodiments 1-350, wherein the AAV capsid variant comprises the amino acid sequence corresponding to positions 138-736, e.g., a VP2, of SEQ ID NO: 138, or a sequence with at least 80% (e.g., at least about 85, 90, 95, 96, 97, 98, or 99%) sequence identity thereto.
[0824] 352. The isolated AAV particle of any one of embodiments 1-351, wherein the AAV capsid variant comprises the amino acid sequence corresponding to positions 203-736, e.g., a VP3, of SEQ ID NO: 138, or a sequence with at least 80% (e.g., at least about 85, 90, 95, 96, 97, 98, or 99%) sequence identity thereto.
[0825] 353. An isolated, e.g., recombinant, AAV particle comprising an AAV capsid variant and a nucleic acid comprising a transgene encoding a transgene encoding an antibody molecule which binds to tau, wherein the AAV capsid variant comprises the amino acid sequence of SEQ ID NO: 5.
[0826] 354. The isolated AAV particle of embodiment 353, wherein the nucleotide sequence encoding the AAV capsid variant comprises the nucleotide sequence of SEQ ID NO: 4.
[0827] 355. An isolated, e.g., recombinant, AAV particle comprising an AAV capsid variant and a nucleic acid comprising a transgene encoding a transgene encoding an antibody molecule which binds to tau, wherein the AAV capsid variant comprises the amino acid sequence of SEQ ID NO: 8.
[0828] 356. The isolated AAV particle of embodiment 355, wherein the nucleotide sequence encoding the AAV capsid variant comprises the nucleotide sequence of SEQ ID NO: 7.
[0829] 357. An isolated, e.g., recombinant, AAV particle comprising an AAV capsid variant and a nucleic acid comprising a transgene encoding a transgene encoding an antibody molecule which binds to tau, wherein the AAV capsid variant comprises the amino acid sequence of SEQ ID NO: 3636.
[0830] 358. The isolated AAV particle of embodiment 357, wherein the nucleotide sequence encoding the AAV capsid variant comprises the nucleotide sequence of SEQ ID NO: 3623.
[0831] 359. The isolated AAV particle of any one of the preceding embodiments, wherein the AAV capsid variant does not comprise:
   [0832] (i) the amino acid sequence of TLAVPFK (SEQ ID NO: 1262) present immediately subsequent to position 588, numbered according to SEQ ID NO: 138;
   [0833] (ii) an amino acid sequence present immediately subsequent to position 586 to 599, e.g., 586 to 594, 587 to 595, 588 to 596, 589 to 597, 590 to 598 numbered relative to SEQ ID NO: 138, having at least 5 consecutive amino acids corresponding to positions 586 to 594 numbered relative to SEQ ID NO: 138, of any the amino acid sequences provided in Table 1 of WO2020223276, the contents of which are hereby incorporated by reference in their entirety; or
   [0834] (iii) an amino acid sequence present immediately subsequent to position 586 to 599, e.g., 586 to 594, 587 to 595, 588 to 596, 589 to 597, 590 to 598 numbered relative to SEQ ID NO: 138, having at least 5 consecutive amino acids corresponding to positions 586 to 594 numbered relative to SEQ ID NO: 138, of any SEQ ID NOs: 1, 12, 13, or 138.
[0835] 360. The isolated AAV particle of any one of the preceding embodiments, wherein the AAV capsid variant has an increased tropism for a CNS cell or tissue, e.g., a brain cell, brain tissue, spinal cord cell, or spinal cord tissue, relative to the tropism of a reference sequence comprising the amino acid sequence of SEQ ID NO: 138.
[0836] 361. The isolated AAV particle of any one of embodiments 15-360, wherein the AAV capsid variant has an increased tropism for a CNS cell or tissue, e.g., a brain cell, brain tissue, spinal cord cell, or spinal cord tissue, relative to the tropism of a reference sequence comprising the amino acid sequence of SEQ ID NO: 3636.
[0837] 362. The isolated AAV particle of any one of embodiments 15-361, wherein the AAV capsid variant is enriched at least about 1.1, 1.2, 1.3, 1.4, 1.5, 1.6, 1.7, 1.8, 1.9, 2, 2.5, 3, 3.5, 4, 4.5, 5, 5.5, or 6-fold, in the brain compared to a reference sequence of SEQ ID NO: 3636, e.g., when measured by an assay as described in Example 1.
[0838] 363. The isolated AAV particle of any one of embodiments 72, 75, 76, 271, 278, 281, 286, 287, 292, or 305-362, wherein the AAV capsid variant results in greater than 1, 2, 5, 10, 20, 30, 40, 50, or 100 reads per sample, e.g., when analyzed by an NGS sequencing assay, e.g., as described in Example 1.
[0839] 364. The isolated AAV particle of any one of embodiments 15-363, wherein the AAV capsid variant is enriched in the brain of at least two to three species, e.g., a non-human primate and rodent (e.g., mouse), e.g., as compared to a reference sequence of SEQ ID NO: 138.
[0840] 365. The isolated AAV particle of embodiment 364, wherein the at least two to three species are Macaca fascicularis, Chlorocebus sabaeus, Callithrix jacchus, and/or mouse (e.g., BALB/c mice).
[0841] 366. The isolated AAV particle of any one of the preceding embodiments, wherein the AAV capsid variant further comprises a modification, e.g., substitution (e.g., conservative substitution), insertion, or deletion, that results in one, two, three or all of: (1) reduced tropism in the liver; (2) de-targeted expression in the liver; (3) reduced activity in the liver; and/or (4) reduced binding to galactose.
[0842] 367. The AAV capsid variant of any one of the preceding embodiments, wherein the AAV capsid variant further comprises:
   [0843] (i) a modification e.g., substitution (e.g., conservative substitution), insertion, or deletion, at position N470 (e.g., N470A), D271 (e.g., D271A), N272 (e.g., N297A), Y446 (e.g., Y446A), N498 (e.g., N498Y or N498I), W503 (e.g., W530R or W530A), L620 (e.g., L620F), or a combination thereof, relative to a reference sequence numbered according to SEQ ID NO: 138; or
   [0844] (ii) one, two, three, four, five or all of an amino acid other than N at position 470 (e.g., A), an amino acid other than D at position 271 (e.g., A), an amino acid other than N at position 272 (e.g., A), an amino acid other than Y at position 446 (e.g., A), and amino acid other than N at position 498 (e.g., Y or I), and amino acid other than W at position 503 (e.g., R or A), and amino acid other than L at position 620 (e.g., F), relative to a reference sequence numbered according to SEQ ID NO: 138.
[0845] 368. The isolated AAV particle of any one of the preceding embodiments, wherein the antibody molecule binds to the N-terminal region or an epitope within the N-terminal region of a tau protein (e.g., human tau).
[0846] 369. The isolated AAV particle of embodiment 368, wherein the antibody molecule binds to all or a portion of (e.g., one or more residues within) amino acid residues (a) 9-18, (b) 15-25, (c) 25-30, and/or (d) 15-30 of a tau protein, numbered according to SEQ ID NO: 9200.
[0847] 370. The isolated AAV particle of any one of embodiments 1-367, wherein the antibody molecule binds to the mid-domain region or an epitope within the mid-domain region of a tau protein (e.g., human tau).
[0848] 371. The isolated AAV particle of embodiment 370, wherein the antibody molecule binds to all or a portion of (e.g., one or more residues within) amino acid residues (a) 125-131, (b) 204-222, (c) 234-246, (d) 234-259, and/or (e) 235-246, numbered according to SEQ ID NO: 9200.
[0849] 372. The isolated AAV particle of embodiment 371, wherein the antibody molecule binds to an epitope which includes one or more of pT181, pS199, pS202, pT205, pT212, pS214, pT217, pT231, pS234, pS235, pS258, pS259, pS396, pS404, and pS409, numbered according to SEQ ID NO: 9200.
[0850] 373. The isolated AAV particle of embodiment 372, wherein the antibody molecule binds to an epitope which includes (a) pS202 and pT205, (b) pT212 and pS214, (c) pT212 and pT217, (c) pT217 and pT231, (d) pT231 and pT234 (or pT235), (e) pS234 and pS259 (or pS258), and (f) pS396 and pS404, numbered according to SEQ ID NO: 9200.
[0851] 374. The isolated AAV particle of any one of embodiments 1-367, wherein the antibody molecule binds to the C-terminal region or an epitope within the C-terminal region of a tau protein (e.g., human tau).
[0852] 375. The isolated AAV particle of embodiment 374, wherein the antibody molecule binds to all or a portion of (e.g., one or more residues within) amino acid residues (a) 387-408 and/or (b) 409-436, numbered according to SEQ ID NO: 9200.
[0853] 376. The isolated AAV particle of embodiment 374, wherein the antibody molecule binds to an epitope which includes pS409, numbered according to SEQ ID NO: 9200.
[0854] 377. The isolated AAV particle of any one of embodiments 1-367, wherein the antibody molecule binds to the microtubule-binding domain or an epitope within the microtubule-binding domain of a tau protein (e.g., human tau).
[0855] 378. The isolated AAV particle of any one of embodiments 1-367, wherein the antibody molecule binds to the proline rich domain or an epitope within the proline rich domain of a tau protein (e.g., human tau).
[0856] 379. The isolated AAV particle of any one of embodiments 1-367, wherein the antibody molecule binds to a region that overlaps with the N-terminal domain and the mid-domain of a tau protein (e.g., human tau).
[0857] 380. The isolated AAV particle of any one of embodiments 1-367, wherein the antibody molecule binds to a region that overlaps with the mid-domain and the microtubule-binding domain of a tau protein (e.g., human tau).
[0858] 381. The isolated AAV particle of any one of embodiments 1-367, wherein the antibody molecule binds to a region that overlaps with the mid-domain and the C-terminal domain of a tau protein (e.g., human tau).
[0859] 382. The isolated AAV particle of any one of embodiments 1-367, wherein the antibody molecule binds to all or a portion of (e.g., one or more residues within) amino acid residues (a) 32-49, (b) 55-76, (c) 57-72, (d) 159-194, (e) 175-191, (f) 185-200, (g) 219-247, (h) 223-238, (i) 381-426, (j) 383-400, (k) 409-436, and/or (1) 413-430, numbered according to SEQ ID NO: 9200.
[0860] 383. The isolated AAV particle of embodiment 382, wherein the antibody molecule binds to all or a portion of (e.g., one or more residues within) amino acid residues (a) 55-76, (b) 159-194, (c) 219-247, and/or (d) 381-426, numbered according to SEQ ID NO: 9200.
[0861] 384. The isolated AAV particle of embodiment 382, wherein the antibody molecule binds to all or a portion of (e.g., one or more residues within) amino acid residues (a) 57-72, (b) 175-191, (c) 223-238, and/or (d) 383-400, numbered according to SEQ ID NO: 9200.
[0862] 385. The isolated AAV particle of embodiment 382 and 384, wherein the antibody molecule binds to all or a portion of (e.g., one or more residues within) amino acid residues 223-238, numbered according to SEQ ID NO: 9200.
[0863] 386. The isolated AAV particle of embodiment 382, wherein the antibody molecule binds a conformational epitope which includes all or a portion of (e.g., one or more residues within) amino acid residues (a) 55-76, (b) 159-194, (c) 219-247, and/or (d) 381-426, numbered according to SEQ ID NO: 9200.
[0864] 387. The isolated AAV particle of any one of embodiments 1-386, wherein the antibody molecule comprises:
   [0865] (i) a heavy chain variable region comprising the HCDR1, HCDR2, and HCDR3 sequences of any one of the anti-tau antibody molecules described herein (e.g., an antibody molecule listed in Tables 7-16); and/or
   [0866] (ii) a light chain variable region comprising the LCDR1, LCDR2, and LCDR3 sequences of any one of the anti-tau antibody molecules described herein (e.g., an antibody molecule listed in Tables 7-16).
[0867] 388. The isolated AAV particle of any one of embodiments 1-387, wherein the antibody molecule comprises a heavy chain variable region comprising HCDR1, HCDR2, and HCDR3, and a light chain variable region comprising LCDR1, LCDR2, and LCDR3, of any one of the anti-tau antibody molecules described herein (e.g., an antibody molecule listed in Tables 7-16).
[0868] 389. The isolated AAV particle of any one of embodiments 1-388, wherein the antibody molecule comprises:
   [0869] (i) a heavy chain variable region (VH) comprising the amino acid sequence of the VH of any one of the anti-tau antibody molecules described herein (e.g., the VH sequence of an antibody molecule listed in Tables 7-16), or an amino acid sequence having at least 80% (e.g., 85, 90, 95, 96, 97, 98, or 99%) sequence identity to the VH sequence of any one of the anti-tau antibody molecules described herein (e.g., the VH sequence of an antibody molecule listed in Tables 7-16), or an amino acid sequence having at least one, two or three modifications, but not more than 30, 20 or 10 modifications, to the amino acid sequence of the VH of any of the anti-tau antibody molecules described herein (e.g., the VH sequence of an antibody molecule listed in Tables 7-16); and/or
   [0870] (ii) a light chain variable region (VL) comprising the amino acid sequence of the VL of any one of the anti-tau antibody molecules described herein (e.g., the VL sequence of an antibody molecule listed in Tables 7-16), or an amino acid sequence having at least 80% (e.g., 85, 90, 95, 96, 97, 98, or 99%) sequence identity to the VL sequence of any one of the anti-tau antibody molecules described herein (e.g., the VL sequence of an antibody molecule listed in Tables 7-16), or an amino acid sequence having at least one, two or three modifications, but not more than 30, 20 or 10 modifications, to the amino acid sequence of the VL of any of the anti-tau antibody molecules described herein (e.g., the VL sequence of an antibody molecule listed in Tables 7-16).
[0871] 390. The isolated AAV particle of any one of embodiments 1-389, wherein the antibody molecule comprises the VH region and the VL region of any one of the anti-tau antibody molecule described herein (e.g., the VH and VL region sequences of an antibody molecule listed in Tables 7-16).
[0872] 391. The isolated AAV particle of any one of embodiments 1-390, wherein the antibody molecule comprises the HCDR1, HCDR2, and/or HCDR3 sequences, and/or LCDR1, LCDR2, and/or LCDR3 sequences of V0022, V0004, V0009, V0023, V0024, V0052, IPN002, AT8, PT3, UCB, PT76, PHF1, or C10.2.
[0873] 392. The isolated AAV particle of any one of embodiments 1-391, wherein the antibody molecule comprises:
   [0874] (i) an HCDR1, an HCDR2, and an HCDR3 comprising the amino acid sequence of SEQ ID NOs: 1631, 1551, and 1552, respectively; and/or an LCDR1, an LCDR2, and an LCDR3 comprising the amino acid sequence of SEQ ID NOs: 1632, 1633, and 1566, respectively;
   [0875] (ii) an HCDR1, an HCDR2, and an HCDR3 comprising the amino acid sequence of SEQ ID NOs: 1634, 1635, and 1552, respectively; and/or an LCDR1, an LCDR2, and an LCDR3 comprising the amino acid sequence of SEQ ID NOs: 1636, 1633, and 1566, respectively; or
   [0876] (iii) an HDR1, an HCDR2, and an HCDR3 comprising the amino acid sequence of SEQ ID NOs: 1637, 1638, and 1557, respectively; and/or an LCDR1, an LCDR2, and an LCDR3 comprising the amino acid sequence of SEQ ID NOs: 1639, 1569, and 1566, respectively.
[0877] 393. The isolated AAV particle of any one of embodiments 1-392, wherein the antibody molecule comprises:
   [0878] (i) an HCDR1, an HCDR2, and an HCDR3 comprising the amino acid sequence of SEQ ID NOs: 1550, 1551, and 1552, respectively; and/or an LCDR1, an LCDR2, and an LCDR3 comprising the amino acid sequence of SEQ ID NOs: 1564, 1565, and 1566, respectively;
   [0879] (ii) an HCDR1, an HCDR2, and an HCDR3 comprising the amino acid sequence of SEQ ID NO: 1553, 1554, and 1552, respectively; and/or an LCDR1, an LCDR2, and an LCDR3 comprising the amino acid sequence of SEQ ID NO: 1567, 1565, and 1566, respectively;
   [0880] (iii) an HCDR1, an HCDR2, and an HCDR3 comprising the amino acid sequence of SEQ ID NOs: 1555, 1556, and 1557, respectively; and/or an LCDR1, an LCDR2, and an LCDR3 comprising the amino acid sequence of SEQ ID NOs: 1568, 1569, and 1566, respectively,
   [0881] (iv) the HCDR1, HCDR2, and/or HCDR3 sequences, and/or LCDR1, LCDR2, and/or LCDR3 sequences of any one of (i)-(iii), with at most one, two, or three substitutions (e.g., conservative amino acid substitutions) in each CDR.
[0882] 394. The isolated AAV particle of any one of embodiments 1-392, wherein the antibody molecule comprises:
   [0883] (i) an HCDR1, an HCDR2, and an HCDR3 comprising the amino acid sequence of SEQ ID NOs: 1575, 1551, and 1552, respectively; and/or an LCDR1, an LCDR2, and an LCDR3 comprising the amino acid sequence of SEQ ID NOs: 1585, 1565, and 1566, respectively;
   [0884] (ii) an HCDR1, an HCDR2, and an HCDR3 comprising the amino acid sequence of SEQ ID NOs: 1576, 1577, and 1552, respectively; and/or an LCDR1, an LCDR2, and an LCDR3 comprising the amino acid sequence of SEQ ID NOs: 1585, 1565, and 1566, respectively;
   [0885] (iii) an HCDR1, an HCDR2, and an HCDR3 comprising the amino acid sequence of SEQ ID NOs: 1578, 1579, and 1557, respectively; and/or an LCDR1, an LCDR2, and an LCDR3 comprising the amino acid sequence of SEQ ID NOs: 1586, 1569, and 1566, respectively;
   [0886] (iv) the HCDR1, HCDR2, and/or HCDR3 sequences, and/or LCDR1, LCDR2, and/or LCDR3 sequences of any one of (i)-(iii), with at most one, two, or three substitutions (e.g., conservative amino acid substitutions) in each CDR.
[0887] 395. The isolated AAV particle of any one of embodiments 1-392, wherein the antibody molecule comprises:
   [0888] (i) an HCDR1, an HCDR2, and an HCDR3 comprising the amino acid sequence of SEQ ID NOs: 1593, 1551, and 1552, respectively; and/or an LCDR1, an LCDR2, and an LCDR3 comprising the amino acid sequence of SEQ ID NOs: 1601, 1602, and 1566, respectively;
   [0889] (ii) an HCDR1, an HCDR2, and an HCDR3 comprising the amino acid sequence of SEQ ID NO: 1594, 1595, and 1552, respectively; and/or an LCDR1, an LCDR2, and an LCDR3 comprising the amino acid sequence of SEQ ID NO: 1601, 1602, and 1566, respectively;
   [0890] (iii) an HCDR1, an HCDR2, and an HCDR3 comprising the amino acid sequence of SEQ ID NOs: 1596, 1556, and 1557, respectively; and/or an LCDR1, an LCDR2, and an LCDR3 comprising the amino acid sequence of SEQ ID NOs: 1603, 1569, and 1566, respectively;
   [0891] (iv) the HCDR1, HCDR2, and/or HCDR3 sequences, and/or LCDR1, LCDR2, and/or LCDR3 sequences of any one of (i)-(iii), with at most one, two, or three substitutions (e.g., conservative amino acid substitutions) in each CDR.
[0892] 396. The isolated AAV particle of any one of embodiments 1-391, wherein the antibody molecule comprises:
   [0893] (i) an HCDR1, an HCDR2, and an HCDR3 comprising the amino acid sequence of SEQ ID NOs: 1608, 1609, and 1610, respectively; and/or an LCDR1, an LCDR2, and an LCDR3 comprising the amino acid sequence of SEQ ID NOs: 1621, 1622, and 1623, respectively;
   [0894] (ii) an HCDR1, an HCDR2, and an HCDR3 comprising the amino acid sequence of SEQ ID NO: 1611, 1612, and 1610, respectively; and/or an LCDR1, an LCDR2, and an LCDR3 comprising the amino acid sequence of SEQ ID NO: 1621, 1622, and 1623, respectively;
   [0895] (iii) an HCDR1, an HCDR2, and an HCDR3 comprising the amino acid sequence of SEQ ID NOs: 1613, 1614, and 1615, respectively; and/or an LCDR1, an LCDR2, and an LCDR3 comprising the amino acid sequence of SEQ ID NOs: 1624, 1625, and 1623, respectively;
   [0896] (iv) the HCDR1, HCDR2, and/or HCDR3 sequences, and/or LCDR1, LCDR2, and/or LCDR3 sequences of any one of (i)-(iii), with at most one, two, or three substitutions (e.g., conservative amino acid substitutions) in each CDR.
[0897] 397. The isolated AAV particle of any one of embodiments 1-391, wherein the antibody molecule comprises:
   [0898] (i) an HCDR1, an HCDR2, and an HCDR3 comprising the amino acid sequence of SEQ ID NOs: 1525, 1526, and 1527, respectively; and/or an LCDR1, an LCDR2, and an LCDR3 comprising the amino acid sequence of SEQ ID NOs: 1539, 1540, and 1541, respectively;
   [0899] (ii) an HCDR1, an HCDR2, and an HCDR3 comprising the amino acid sequence of SEQ ID NO: 1528, 1529, and 1527, respectively; and/or an LCDR1, an LCDR2, and an LCDR3 comprising the amino acid sequence of SEQ ID NO: 1539, 1540, and 1541, respectively;
   [0900] (iii) an HCDR1, an HCDR2, and an HCDR3 comprising the amino acid sequence of SEQ ID NOs: 1530, 1531, and 1532, respectively; and/or an LCDR1, an LCDR2, and an LCDR3 comprising the amino acid sequence of SEQ ID NOs: 1542, 1543, and 1541, respectively; or
   [0901] (iv) the HCDR1, HCDR2, and/or HCDR3 sequences, and/or LCDR1, LCDR2, and/or LCDR3 sequences of any one of (i)-(iii), with at most one, two, or three substitutions (e.g., conservative amino acid substitutions) in each CDR.
[0902] 398. The isolated AAV particle of any one of embodiments 1-391, wherein the antibody molecule comprises:
   [0903] (i) an HCDR1, an HCDR2, and an HCDR3 comprising the amino acid sequence of SEQ ID NOs: 1500, 1501, and 1502, respectively; and/or an LCDR1, an LCDR2, and an LCDR3 comprising the amino acid sequence of SEQ ID NOs: 1514, 1515, and 1516, respectively;
   [0904] (ii) an HCDR1, an HCDR2, and an HCDR3 comprising the amino acid sequence of SEQ ID NO: 1503, 1504, and 1502, respectively; and/or an LCDR1, an LCDR2, and an LCDR3 comprising the amino acid sequence of SEQ ID NO: 1514, 1515, and 1516, respectively;
   [0905] (iii) an HCDR1, an HCDR2, and an HCDR3 comprising the amino acid sequence of SEQ ID NOs: 1505, 1506, and 1507, respectively; and/or an LCDR1, an LCDR2, and an LCDR3 comprising the amino acid sequence of SEQ ID NOs: 1517, 1518, and 1516, respectively; or
   [0906] (iv) the HCDR1, HCDR2, and/or HCDR3 sequences, and/or LCDR1, LCDR2, and/or LCDR3 sequences of any one of (i)-(iii), with at most one, two, or three substitutions (e.g., conservative amino acid substitutions) in each CDR.
[0907] 399. The isolated AAV particle of any one of embodiments 1-393, wherein the antibody molecule comprises:
   [0908] (a) the VH and/or VL sequences of SEQ ID NOs: 1562 and 1573, respectively;
   [0909] (b) the VH and/or VL sequences of SEQ ID NOs: 1512 and 1523, respectively;
   [0910] (c) the VH and/or VL sequences of SEQ ID NOs: 1537 and 1548, respectively;
   [0911] (d) the VH and/or VL sequences of SEQ ID NOs: 1583 and 1591, respectively;
   [0912] (e) the VH and/or VL sequences of SEQ ID NOs: 1599 and 1606, respectively;
   [0913] (f) the VH and/or VL sequences of SEQ ID NOs: 1619 and 1629, respectively;
   [0914] (g) the VH and/or VL sequences of SEQ ID NOs: 1822 and 1941, respectively;
   [0915] (h) the VH and/or VL sequences of SEQ ID NOs: 1849 and 1970, respectively;
   [0916] (i) the VH and/or VL sequences of SEQ ID NOs: 1844 and 1964, respectively;
   [0917] (j) the VH and/or VL sequences of SEQ ID NOs: 1803 and 1919, respectively;
   [0918] (k) a VH sequence having at least 80% (e.g., 85, 90, 95, 96, 97, 98, or 99%) sequence identity to the VH sequence of any one of (a)-(j), and/or a VL sequence having at least 80% (e.g., 85, 90, 95, 96, 97, 98, or 99%) sequence identity to the VL sequence of any one of (a)-(j); or
   [0919] (l) a VH sequence having at least one, two, or three modifications, but not more than 30, 20, or 10 modifications, relative to the VH sequence of any one of (a)-(j), and/or a VL sequence having at least one, two, or three modifications, but not more than 30, 20, or 10 modifications, relative to the VL sequence of any one of (a)-(j).
[0920] 400. The isolated AAV particle of embodiment 399, wherein the antibody molecule comprises a VH sequence having at least 80% (e.g., 85, 90, 95, 96, 97, 98, or 99%) sequence identity to the VH sequence of SEQ ID NO: 1562, and/or a VL sequence having at least 80% (e.g., 85, 90, 95, 96, 97, 98, or 99%) sequence identity to the VL sequence of SEQ ID NO: 1573, respectively.
[0921] 401. The isolated AAV particle of embodiment 399, wherein the antibody molecule comprises a VH sequence having at least one, two, or three modifications, but not more than 30, 20, or 10 modifications, relative to the VH sequence of SEQ ID NO: 1562, and/or a VL sequence having at least one, two, or three modifications, but not more than 30, 20, or 10 modifications, relative to the VL sequence of SEQ ID NO: 1573.
[0922] 402. The isolated AAV particle of embodiment 399, wherein the antibody molecule comprises the VH and VL sequences of SEQ ID NOs: 1562 and 1573, respectively.
[0923] 403. The isolated AAV particle of embodiment 402, wherein the antibody molecule comprises a VH sequence encoded by a nucleotide sequence having at least 80% (e.g., 85, 90, 95, 96, 97, 98, or 99%) sequence identity to any one of SEQ ID NOs: 1563, 1513, 1538, 1584, 1600, or 1620 and/or a VL sequence encoded by a nucleotide sequence having at least 80% (e.g., 85, 90, 95, 96, 97, 98, or 99%) sequence identity to any one of SEQ ID NOs: 1574, 1524, 1549, 1592, 1607, or 1630.
[0924] 404. The isolated AAV particle of embodiment 403, wherein the antibody molecule comprises VH and VL sequences encoded by nucleotide sequences set forth in (a) SEQ ID NOs: 1563 and 1574, respectively, (b) SEQ ID NOs: 1513 and 1524, respectively, (c) SEQ ID NOs: 1538 and 1549, respectively, (d) SEQ ID NOs: 1584 and 1592, respectively, (e) SEQ ID NOs: 1600 and 1607, respectively, (f) SEQ ID NOs: 1620 and 1630, respectively, or (g) a nucleotide sequence having at least 80% (e.g., 85, 90, 95, 96, 97, 98, or 99%) sequence identity to any one of (a)-(f).
[0925] 405. The isolated AAV particle of embodiment 403 or 404, wherein the antibody molecule comprises a VH sequence encoded by the nucleotide sequence of SEQ ID NO: 1563 and a VL sequence encoded by the nucleotide sequence of SEQ ID NO: 1574.
[0926] 406. The isolated AAV particle of any one of embodiments 1-391, wherein the antibody molecule comprises:
   [0927] (a) the HCDR1, HCDR2, and/or HCDR3 sequences of SEQ ID NOs: 1777, 1778, and 1779, respectively, and/or the LCDR1, LCDR2, and/or LCDR3 sequences of SEQ ID NOs: 1889, 1890, and 1891, respectively;
   [0928] (b) the HCDR1, HCDR2, and/or HCDR3 sequences of SEQ ID NOs: 1790, 1792, and 1794, respectively, and/or the LCDR1, LCDR2, and/or LCDR3 sequences of SEQ ID NOs: 1908, 1910, and 1912, respectively;
   [0929] (c) the HCDR1, HCDR2, and/or HCDR3 sequences of SEQ ID NOs: 1761, 1762, and 1763, respectively, and/or the LCDR1, LCDR2, and/or LCDR3 sequences of SEQ ID NOs: 1880, 1881, and 1882, respectively; or
   [0930] (d) the HCDR1, HCDR2, and/or HCDR3 sequences, and/or LCDR1, LCDR2, and/or LCDR3 sequences of any one of (a)-(c), with at most one, two, or three substitutions (e.g., conservative amino acid substitutions) in each CDR.
[0931] 407. The isolated AAV particle of any one of embodiments 1-367, wherein the antibody molecule binds to all or a portion of amino acid residues of tau selected from: (a) 183-212, (b) 187-218, (c) 33-82, 159-182, 197-226, and 229-246; (d) 217-242, (e) 35-76 and 187-218, (f) 5-34, (g) 187-218, (h) 33-82, 159-188, and 191-230, (i) 35-62, 107-124, and 203-220, (j) 35-82, 159-188, and 197-224, and (k) 53-78, 329-348, or 381-408, wherein human tau is numbered according to SEQ ID NO: 9200.
[0932] 408. The isolated AAV particle of embodiment 407, wherein one or more of the serines, threonines, and/or tyrosines in the stretch of amino acids selected from (a)-(k) are phosphorylated.
[0933] 409. The isolated AAV particle of embodiment 407 or 408, wherein all of the serines, threonines, and/or tyrosines in the stretch of amino acids selected from (a)-(k) are phosphorylated.
[0934] 410. The isolated AAV particle of any one of embodiments 1-376 or 407-409, wherein the antibody molecule binds to all or a portion of amino acids 195-215 of tau, e.g., with a dissociation constant (KD) of about 1 pM to about 50 pM, or about 1-25 pM, e.g., as assessed by bio-layer interferometry.
[0935] 411. The isolated AAV particle of any one of embodiments 1-376 or 407-409, wherein the antibody molecule binds to all or a portion of amino acids 191-214 of tau phosphorylated at S199, e.g., with a dissociation constant (KD) of about 0.1 nM to about 10 nM, or about 0.5-5 nM, e.g., as assessed by bio-layer interferometry.
[0936] 412. The isolated AAV particle of any one of embodiments 1-376 or 407-409, wherein the antibody molecule binds to all or a portion of amino acids 217-234 of tau phosphorylated at T217, T220, and T231, e.g., with a dissociation constant (KD) of about 0.1 nM to about 10 nM, or about 0.1-5 nM, e.g., as assessed by bio-layer interferometry.
[0937] 413. The isolated AAV particle of any one of embodiments 1-376 or 407-409, wherein the antibody molecule binds to all or a portion of amino acids 225-240 of tau phosphorylated at T231, e.g., with a dissociation constant (KD) of about 0.1 nM to about 25 nM, or about 0.1-15 nM, e.g., as assessed by bio-layer interferometry.
[0938] 414. The isolated AAV particle of any one of embodiments 1-376 or 407-409, wherein the antibody molecule binds to human tau phosphorylated at amino acid residue 5404, or a peptide comprising or consisting of the amino acid sequence DHGAEIVYKSPVVSGDT(pS)PRHLSNVSSTG (SEQ ID NO: 2143), wherein p(S) corresponds to a phosphorylated serine residue, optionally wherein the antibody molecule comprises a heavy chain variable region (VH) comprising HCDR1, HCDR2, and HCDR3 sequences comprising SEQ ID NOs: 2430, 2431, and 2432, respectively, and a light chain variable region (VL) comprising LCDR1, LCDR2, and LCDR3 sequences comprising SEQ ID NOs: 2435, 2436, and 2437, respectively.
[0939] 415. The isolated AAV particle of any one of embodiments 1-376 or 407-409, wherein the antibody molecule binds to:
   [0940] (a) human tau phosphorylated at amino acid residue S199, but not at amino acid residues S202 and T205,
   [0941] (b) human tau phosphorylated at amino acid residue S202, but not at amino acid residues S199 and T205,
   [0942] (c) human tau phosphorylated at amino acid residue T205, but not at amino acid residues S199 and S202,
   [0943] (d) human tau phosphorylated at a combination of amino acid residues S199 and T205, but not at amino acid residue S202 (e.g., wherein binding tau phosphorylated at a combination of S199 and T205 is at least 3-times stronger (e.g., at least 4-time stronger) than background (e.g., non-specific) level of binding, e.g., binding by hIgG1 isotype control),
   [0944] (e) human tau phosphorylated at a combination of amino acid residues S202 and T205, but not at amino acid residue S199, but not human tau phosphorylated at a combination of residues S199 and S202, but not T205,
   [0945] (f) human tau phosphorylated at a combination of amino acid residues (i) S202 and T205, but not S119, and (ii) S199 and T205, but not 5202, e.g., at least 2 times (e.g., at least 3 times, at least 4 times, at least 5 times, 2-6 times, 2-5 times, 2-4 times, 2-3 times, 3-5 times or 4-5 times) more strongly than background (e.g., non-specific) level of binding, e.g., binding by hIgG1 isotype control).
   [0946] (g) human tau phosphorylated at a combination of amino acid residues (i) S199 and S202, but not T205, (ii) S202 and T205, but not S199, (iii) S199 and T205, but not S202, and (iv) S199, S202, and T205 (e.g., wherein binding to phosphorylated tau is at least 1.6-times stronger (e.g., at least 1.7 times, at least 1.8 times, at least 1.9 times, at least 2 times, at least 3 times, 1.6-3 times, 1.6-2 times stronger) than background (e.g., non-specific) level of binding, e.g., binding by hIgG1 isotype control),
   [0947] (h) a peptide comprising or consisting of the amino acid sequence

(SEQ ID NO: 2146)
SGDRSGYS(pS)PGSPGTPGSRSRTPS,

[0948] (i) a peptide comprising or consisting of the amino acid sequence

(SEQ ID NO: 2147)
SGDRSGYSSPG(pS)PGTPGSRSRTPS,

[0949] (j) a peptide comprising or consisting of the amino acid sequence

(SEQ ID NO: 2148)
SGDRSGYSSPGSPG(pT)PGSRSRTPS,

[0950] (k) a peptide comprising or consisting of the amino acid sequence SGDRSGYS(pS)PGSPG(pT)PGSRSRTPS (SEQ ID NO: 2152) (e.g., wherein binding to the peptide is at least 3 times stronger (e.g., at least 4 times stronger) than background (e.g., non-specific) level of binding, e.g., binding by hIgG1 isotype control),
[0951] (l) a peptide comprising or consisting of the amino acid sequence SGDRSGYSSPG(pS)PG(pT)PGSRSRTPS (SEQ ID NO: 2151), but not a peptide comprising or consisting of the amino acid sequence SGDRSGYS(pS)PG(pS)PGTPGSRSRTPS (SEQ ID NO: 2150),
[0952] (m) peptides comprising or consisting of the amino acid sequences SGDRSGYSSPG(pS)PG(pT)PGSRSRTPS (SEQ ID NO: 2151) and SGDRSGYS(pS)PGSPG(pT)PGSRSRTPS (SEQ ID NO: 2152), wherein binding to the latter peptide is at least 2 times (e.g., at least 3 times, at least 4 times, at least 5 times, 2-6 times, 2-5 times, 2-4 times, 2-3 times, 3-5 times or 4-5 times) more stronger than background (e.g., non-specific) level of binding, e.g., binding by hIgG1 isotype control), or
[0953] (n) peptides comprising or consisting of the amino acid sequences SGDRSGYS(pS)PG(pS)PGTPGSRSRTPS (SEQ ID NO: 2150), SGDRSGYSSPG(pS)PG(pT)PGSRSRTPS (SEQ ID NO: 2151), SGDRSGYS(pS)PGSPG(pT)PGSRSRTPS (SEQ ID NO: 2152), and SGDRSGYS(pS)PG(pS)PG(pT)PGSRSRTPS (SEQ ID NO: 2149) (e.g., wherein binding to the peptides is at least 1.6 times stronger (e.g., at least 1.7 times, at least 1.8 times, at least 1.9 times, at least 2 times, at least 3 times, 1.6-4 times, 1.6-3 times stronger) than background (e.g., non-specific) level of binding, e.g., binding by hIgG1 isotype control),
[0954] wherein p(S) and p(T) correspond to a phosphorylated serine and phosphorylated threonine, respectively,
[0955] optionally wherein binding is assessed, e.g., using ELISA, and optionally wherein human tau has the sequence set forth in SEQ ID NO: 9200, and
[0956] optionally wherein the antibody molecule comprises:
[0957] (i) a heavy chain variable region (VH) comprising HCDR1, HCDR2, and HCDR3 sequences comprising SEQ ID NOs: 2200, 2201, and 2202, respectively, and a light chain variable region (VL) comprising LCDR1, LCDR2, and LCDR3 sequences comprising SEQ ID NOs: 2207, 2208, and 2209, respectively;
[0958] (ii) a heavy chain variable region (VH) comprising HCDR1, HCDR2, and HCDR3 sequences comprising SEQ ID NOs: 2218, 2219, and 2220, respectively, and a light chain variable region (VL) comprising LCDR1, LCDR2, and LCDR3 sequences comprising SEQ ID NOs: 2207, 2208, and 2224, respectively;
[0959] (iii) a heavy chain variable region (VH) comprising HCDR1, HCDR2, and HCDR3 sequences comprising SEQ ID NOs: 2248, 2219, and 2249, respectively, and a light chain variable region (VL) comprising LCDR1, LCDR2, and LCDR3 sequences comprising SEQ ID NOs: 2207, 2208, and 2224, respectively;
[0960] (iv) a heavy chain variable region (VH) comprising HCDR1, HCDR2, and HCDR3 sequences comprising SEQ ID NOs: 2273, 2274, and 2275, respectively, and a light chain variable region (VL) comprising LCDR1, LCDR2, and LCDR3 sequences comprising SEQ ID NOs: 2207, 2208, and 2277, respectively; or
[0961] (v) a heavy chain variable region (VH) comprising HCDR1, HCDR2, and HCDR3 sequences comprising SEQ ID NOs: 2371, 2372, and 2373, respectively, and a light chain variable region (VL) comprising LCDR1, LCDR2, and LCDR3 sequences comprising SEQ ID NOs: 2207, 2208, and 2224, respectively.
[0962] 416. The isolated AAV particle of any one of embodiments 1-376 or 407-409, wherein the antibody molecule binds to:
   [0963] (a) human tau phosphorylated at amino acid residue S199, but not at amino acid residues S202 and T205, optionally wherein the antibody comprises a heavy chain variable region (VH) comprising HCDR1, HCDR2, and HCDR3 sequences comprising SEQ ID NOs: 2200, 2201, and 2202, respectively, and a light chain variable region (VL) comprising LCDR1, LCDR2, and LCDR3 sequences comprising SEQ ID NOs: 2207, 2208, and 2209, respectively;
   [0964] (b) human tau phosphorylated at amino acid residue S202, but not at amino acid residues S199 and T205, optionally wherein the antibody comprises (i) a heavy chain variable region (VH) comprising HCDR1, HCDR2, and HCDR3 sequences comprising SEQ ID NOs: 2218, 2219, and 2220, respectively, and a light chain variable region (VL) comprising LCDR1, LCDR2, and LCDR3 sequences comprising SEQ ID NOs: 2207, 2208, and 2224, respectively; (ii) a heavy chain variable region (VH) comprising HCDR1, HCDR2, and HCDR3 sequences comprising SEQ ID NOs: 2248, 2219, and 2249, respectively, and a light chain variable region (VL) comprising LCDR1, LCDR2, and LCDR3 sequences comprising SEQ ID NOs: 2207, 2208, and 2224, respectively; or (iii) a heavy chain variable region (VH) comprising HCDR1, HCDR2, and HCDR3 sequences comprising SEQ ID NOs: 2371, 2372, and 2373, respectively, and a light chain variable region (VL) comprising LCDR1, LCDR2, and LCDR3 sequences comprising SEQ ID NOs: 2207, 2208, and 2224, respectively;
   [0965] (c) human tau phosphorylated at amino acid residue T205, but not at amino acid residues S199 and S202, optionally wherein the antibody comprises (i) a heavy chain variable region (VH) comprising HCDR1, HCDR2, and HCDR3 sequences comprising SEQ ID NOs: 2218, 2219, and 2220, respectively, and a light chain variable region (VL) comprising LCDR1, LCDR2, and LCDR3 sequences comprising SEQ ID NOs: 2207, 2208, and 2224, respectively; (ii) a heavy chain variable region (VH) comprising HCDR1, HCDR2, and HCDR3 sequences comprising SEQ ID NOs: 2248, 2219, and 2249, respectively, and a light chain variable region (VL) comprising LCDR1, LCDR2, and LCDR3 sequences comprising SEQ ID NOs: 2207, 2208, and 2224, respectively; or (iii) a heavy chain variable region (VH) comprising HCDR1, HCDR2, and HCDR3 sequences comprising SEQ ID NOs: 2371, 2372, and 2373, respectively, and a light chain variable region (VL) comprising LCDR1, LCDR2, and LCDR3 sequences comprising SEQ ID NOs: 2207, 2208, and 2224, respectively;
   [0966] (d) human tau phosphorylated at a combination of amino acid residues S199 and T205, but not at amino acid residue S202 (e.g., wherein binding tau phosphorylated at a combination of S199 and T205 is at least 3-times stronger (e.g., at least 4-time stronger) than background (e.g., non-specific) level of binding, e.g., binding by hIgG1 isotype control), optionally wherein the antibody comprises (i) a heavy chain variable region (VH) comprising HCDR1, HCDR2, and HCDR3 sequences comprising SEQ ID NOs: 2218, 2219, and 2220, respectively, and a light chain variable region (VL) comprising LCDR1, LCDR2, and LCDR3 sequences comprising SEQ ID NOs: 2207, 2208, and 2224, respectively; (ii) a heavy chain variable region (VH) comprising HCDR1, HCDR2, and HCDR3 sequences comprising SEQ ID NOs: 2248, 2219, and 2249, respectively, and a light chain variable region (VL) comprising LCDR1, LCDR2, and LCDR3 sequences comprising SEQ ID NOs: 2207, 2208, and 2224, respectively; (iii) a heavy chain variable region (VH) comprising HCDR1, HCDR2, and HCDR3 sequences comprising SEQ ID NOs: 2200, 2201, and 2202, respectively, and a light chain variable region (VL) comprising LCDR1, LCDR2, and LCDR3 sequences comprising SEQ ID NOs: 2207, 2208, and 2209, respectively; or (iv) a heavy chain variable region (VH) comprising HCDR1, HCDR2, and HCDR3 sequences comprising SEQ ID NOs: 2371, 2372, and 2373, respectively, and a light chain variable region (VL) comprising LCDR1, LCDR2, and LCDR3 sequences comprising SEQ ID NOs: 2207, 2208, and 2224, respectively;
   [0967] (e) human tau phosphorylated at a combination of amino acid residues S202 and T205, but not at amino acid residue S199, but not human tau phosphorylated at a combination of residues S199 and S202, but not T205, optionally wherein the antibody comprises a heavy chain variable region (VH) comprising HCDR1, HCDR2, and HCDR3 sequences comprising SEQ ID NOs: 2273, 2274, and 2275, respectively, and a light chain variable region (VL) comprising LCDR1, LCDR2, and LCDR3 sequences comprising SEQ ID NOs: 2207, 2208, and 2277, respectively;
   [0968] (f) human tau phosphorylated at a combination of amino acid residues (i) S202 and T205, but not S119, and (ii) S199 and T205, but not S202, e.g., at least 2 times (e.g., at least 3 times, at least 4 times, at least 5 times, 2-6 times, 2-5 times, 2-4 times, 2-3 times, 3-5 times or 4-5 times) more strongly than background (non-specific) level of binding, e.g., binding by hIgG1 isotype control), optionally wherein the antibody comprises (i) a heavy chain variable region (VH) comprising HCDR1, HCDR2, and HCDR3 sequences comprising SEQ ID NOs: 2218, 2219, and 2220, respectively, and a light chain variable region (VL) comprising LCDR1, LCDR2, and LCDR3 sequences comprising SEQ ID NOs: 2207, 2208, and 2224, respectively; (ii) a heavy chain variable region (VH) comprising HCDR1, HCDR2, and HCDR3 sequences comprising SEQ ID NOs: 2248, 2219, and 2249, respectively, and a light chain variable region (VL) comprising LCDR1, LCDR2, and LCDR3 sequences comprising SEQ ID NOs: 2207, 2208, and 2224, respectively; (iii) a heavy chain variable region (VH) comprising HCDR1, HCDR2, and HCDR3 sequences comprising SEQ ID NOs: 2200, 2201, and 2202, respectively, and a light chain variable region (VL) comprising LCDR1, LCDR2, and LCDR3 sequences comprising SEQ ID NOs: 2207, 2208, and 2209, respectively; or (iv) a heavy chain variable region (VH) comprising HCDR1, HCDR2, and HCDR3 sequences comprising SEQ ID NOs: 2371, 2372, and 2373, respectively, and a light chain variable region (VL) comprising LCDR1, LCDR2, and LCDR3 sequences comprising SEQ ID NOs: 2207, 2208, and 2224, respectively;
   [0969] (g) human tau phosphorylated at a combination of amino acid residues (i) S199 and S202, but not T205, (ii) S202 and T205, but not S199, (iii) S199 and T205, but not S202, and (iv) S199, S202, and T205 (e.g., wherein binding to phosphorylated tau is at least 1.6-times stronger (e.g., at least 1.7 times, at least 1.8 times, at least 1.9 times, at least 2 times, at least 3 times, 1.6-3 times, 1.6-2 times stronger) than background (non-specific) level of binding, e.g., binding by hIgG1 isotype control), optionally wherein the antibody comprises (i) a heavy chain variable region (VH) comprising HCDR1, HCDR2, and HCDR3 sequences comprising SEQ ID NOs: 2218, 2219, and 2220, respectively, and a light chain variable region (VL) comprising LCDR1, LCDR2, and LCDR3 sequences comprising SEQ ID NOs: 2207, 2208, and 2224, respectively; (ii) a heavy chain variable region (VH) comprising HCDR1, HCDR2, and HCDR3 sequences comprising SEQ ID NOs: 2248, 2219, and 2249, respectively, and a light chain variable region (VL) comprising LCDR1, LCDR2, and LCDR3 sequences comprising SEQ ID NOs: 2207, 2208, and 2224, respectively; (iii) a heavy chain variable region (VH) comprising HCDR1, HCDR2, and HCDR3 sequences comprising SEQ ID NOs: 2200, 2201, and 2202, respectively, and a light chain variable region (VL) comprising LCDR1, LCDR2, and LCDR3 sequences comprising SEQ ID NOs: 2207, 2208, and 2209, respectively; or (iv) a heavy chain variable region (VH) comprising HCDR1, HCDR2, and HCDR3 sequences comprising SEQ ID NOs: 2371, 2372, and 2373, respectively, and a light chain variable region (VL) comprising LCDR1, LCDR2, and LCDR3 sequences comprising SEQ ID NOs: 2207, 2208, and 2224, respectively;
   [0970] (h) a peptide comprising or consisting of the amino acid sequence SGDRSGYS(pS)PGSPGTPGSRSRTPS (SEQ ID NO: 2146), optionally wherein the antibody comprises a heavy chain variable region (VH) comprising HCDR1, HCDR2, and HCDR3 sequences comprising SEQ ID NOs: 2200, 2201, and 2202, respectively, and a light chain variable region (VL) comprising LCDR1, LCDR2, and LCDR3 sequences comprising SEQ ID NOs: 2207, 2208, and 2209, respectively
   [0971] (i) a peptide comprising or consisting of the amino acid sequence SGDRSGYSSPG(pS)PGTPGSRSRTPS (SEQ ID NO: 2147), optionally wherein the antibody comprises (i) a heavy chain variable region (VH) comprising HCDR1, HCDR2, and HCDR3 sequences comprising SEQ ID NOs: 2218, 2219, and 2220, respectively, and a light chain variable region (VL) comprising LCDR1, LCDR2, and LCDR3 sequences comprising SEQ ID NOs: 2207, 2208, and 2224, respectively; (ii) a heavy chain variable region (VH) comprising HCDR1, HCDR2, and HCDR3 sequences comprising SEQ ID NOs: 2248, 2219, and 2249, respectively, and a light chain variable region (VL) comprising LCDR1, LCDR2, and LCDR3 sequences comprising SEQ ID NOs: 2207, 2208, and 2224, respectively; or (iii) a heavy chain variable region (VH) comprising HCDR1, HCDR2, and HCDR3 sequences comprising SEQ ID NOs: 2371, 2372, and 2373, respectively, and a light chain variable region (VL) comprising LCDR1, LCDR2, and LCDR3 sequences comprising SEQ ID NOs: 2207, 2208, and 2224, respectively;
   [0972] (j) a peptide comprising or consisting of the amino acid sequence SGDRSGYSSPGSPG(pT)PGSRSRTPS (SEQ ID NO: 2148), optionally wherein the antibody comprises (i) a heavy chain variable region (VH) comprising HCDR1, HCDR2, and HCDR3 sequences comprising SEQ ID NOs: 2218, 2219, and 2220, respectively, and a light chain variable region (VL) comprising LCDR1, LCDR2, and LCDR3 sequences comprising SEQ ID NOs: 2207, 2208, and 2224, respectively; (ii) a heavy chain variable region (VH) comprising HCDR1, HCDR2, and HCDR3 sequences comprising SEQ ID NOs: 2248, 2219, and 2249, respectively, and a light chain variable region (VL) comprising LCDR1, LCDR2, and LCDR3 sequences comprising SEQ ID NOs: 2207, 2208, and 2224, respectively; or (iii) a heavy chain variable region (VH) comprising HCDR1, HCDR2, and HCDR3 sequences comprising SEQ ID NOs: 2371, 2372, and 2373, respectively, and a light chain variable region (VL) comprising LCDR1, LCDR2, and LCDR3 sequences comprising SEQ ID NOs: 2207, 2208, and 2224, respectively;
   [0973] (k) a peptide comprising or consisting of the amino acid sequence SGDRSGYS(pS)PGSPG(pT)PGSRSRTPS (SEQ ID NO: 2152) (e.g., wherein binding to the peptide is at least 3 times stronger (e.g., at least 4 times stronger) than background (non-specific) level of binding, e.g., binding by hIgG1 isotype control), optionally wherein the antibody comprises (i) a heavy chain variable region (VH) comprising HCDR1, HCDR2, and HCDR3 sequences comprising SEQ ID NOs: 2218, 2219, and 2220, respectively, and a light chain variable region (VL) comprising LCDR1, LCDR2, and LCDR3 sequences comprising SEQ ID NOs: 2207, 2208, and 2224, respectively; (ii) a heavy chain variable region (VH) comprising HCDR1, HCDR2, and HCDR3 sequences comprising SEQ ID NOs: 2248, 2219, and 2249, respectively, and a light chain variable region (VL) comprising LCDR1, LCDR2, and LCDR3 sequences comprising SEQ ID NOs: 2207, 2208, and 2224, respectively; (iii) a heavy chain variable region (VH) comprising HCDR1, HCDR2, and HCDR3 sequences comprising SEQ ID NOs: 2200, 2201, and 2202, respectively, and a light chain variable region (VL) comprising LCDR1, LCDR2, and LCDR3 sequences comprising SEQ ID NOs: 2207, 2208, and 2209, respectively; or (iv) a heavy chain variable region (VH) comprising HCDR1, HCDR2, and HCDR3 sequences comprising SEQ ID NOs: 2371, 2372, and 2373, respectively, and a light chain variable region (VL) comprising LCDR1, LCDR2, and LCDR3 sequences comprising SEQ ID NOs: 2207, 2208, and 2224, respectively;
   [0974] (l) a peptide comprising or consisting of the amino acid sequence SGDRSGYSSPG(pS)PG(pT)PGSRSRTPS (SEQ ID NO: 2151), but not a peptide comprising or consisting of the amino acid sequence SGDRSGYS(pS)PG(pS)PGTPGSRSRTPS (SEQ ID NO: 2150), optionally wherein the antibody comprises a heavy chain variable region (VH) comprising HCDR1, HCDR2, and HCDR3 sequences comprising SEQ ID NOs: 2273, 2274, and 2275, respectively, and a light chain variable region (VL) comprising LCDR1, LCDR2, and LCDR3 sequences comprising SEQ ID NOs: 2207, 2208, and 2277, respectively
   [0975] (m) peptides comprising or consisting of the amino acid sequences SGDRSGYSSPG(pS)PG(pT)PGSRSRTPS (SEQ ID NO: 2151) and SGDRSGYS(pS)PGSPG(pT)PGSRSRTPS (SEQ ID NO: 2152), e.g., wherein binding to the latter peptide is at least 2 times (e.g., at least 3 times, at least 4 times, at least 5 times, 2-6 times, 2-5 times, 2-4 times, 2-3 times, 3-5 times or 4-5 times) more stronger than background (non-specific) level of binding, e.g., binding by hIgG1 isotype control), optionally wherein the antibody comprises (i) a heavy chain variable region (VH) comprising HCDR1, HCDR2, and HCDR3 sequences comprising SEQ ID NOs: 2218, 2219, and 2220, respectively, and a light chain variable region (VL) comprising LCDR1, LCDR2, and LCDR3 sequences comprising SEQ ID NOs: 2207, 2208, and 2224, respectively; (ii) a heavy chain variable region (VH) comprising HCDR1, HCDR2, and HCDR3 sequences comprising SEQ ID NOs: 2248, 2219, and 2249, respectively, and a light chain variable region (VL) comprising LCDR1, LCDR2, and LCDR3 sequences comprising SEQ ID NOs: 2207, 2208, and 2224, respectively; (iii) a heavy chain variable region (VH) comprising HCDR1, HCDR2, and HCDR3 sequences comprising SEQ ID NOs: 2200, 2201, and 2202, respectively, and a light chain variable region (VL) comprising LCDR1, LCDR2, and LCDR3 sequences comprising SEQ ID NOs: 2207, 2208, and 2209, respectively; or (iv) a heavy chain variable region (VH) comprising HCDR1, HCDR2, and HCDR3 sequences comprising SEQ ID NOs: 2371, 2372, and 2373, respectively, and a light chain variable region (VL) comprising LCDR1, LCDR2, and LCDR3 sequences comprising SEQ ID NOs: 2207, 2208, and 2224, respectively; or
   [0976] (n) peptides comprising or consisting of the amino acid sequences SGDRSGYS(pS)PG(pS)PGTPGSRSRTPS (SEQ ID NO: 2150), SGDRSGYSSPG(pS)PG(pT)PGSRSRTPS (SEQ ID NO: 2151), SGDRSGYS(pS)PGSPG(pT)PGSRSRTPS (SEQ ID NO: 2152), and SGDRSGYS(pS)PG(pS)PG(pT)PGSRSRTPS (SEQ ID NO: 2149) (e.g., wherein binding to the peptides is at least 1.6 times stronger (e.g., at least 1.7 times, at least 1.8 times, at least 1.9 times, at least 2 times, at least 3 times, 1.6-4 times, 1.6-3 times stronger) than background (non-specific) level of binding, e.g., binding by hIgG1 isotype control), optionally wherein the antibody comprises (i) a heavy chain variable region (VH) comprising HCDR1, HCDR2, and HCDR3 sequences comprising SEQ ID NOs: 2218, 2219, and 2220, respectively, and a light chain variable region (VL) comprising LCDR1, LCDR2, and LCDR3 sequences comprising SEQ ID NOs: 2207, 2208, and 2224, respectively; (ii) a heavy chain variable region (VH) comprising HCDR1, HCDR2, and HCDR3 sequences comprising SEQ ID NOs: 2248, 2219, and 2249, respectively, and a light chain variable region (VL) comprising LCDR1, LCDR2, and LCDR3 sequences comprising SEQ ID NOs: 2207, 2208, and 2224, respectively; (iii) a heavy chain variable region (VH) comprising HCDR1, HCDR2, and HCDR3 sequences comprising SEQ ID NOs: 2200, 2201, and 2202, respectively, and a light chain variable region (VL) comprising LCDR1, LCDR2, and LCDR3 sequences comprising SEQ ID NOs: 2207, 2208, and 2209, respectively; or (iv) a heavy chain variable region (VH) comprising HCDR1, HCDR2, and HCDR3 sequences comprising SEQ ID NOs: 2371, 2372, and 2373, respectively, and a light chain variable region (VL) comprising LCDR1, LCDR2, and LCDR3 sequences comprising SEQ ID NOs: 2207, 2208, and 2224, respectively;
   [0977] wherein p(S) and p(T) correspond to a phosphorylated serine and phosphorylated threonine, respectively,
   [0978] optionally wherein binding is assessed, e.g., using ELISA, and optionally wherein human tau has the sequence set forth in SEQ ID NO: 9200.
[0979] 417. The isolated AAV particle of any one of embodiments 1-376 or 407-409, wherein the antibody molecule binds to:
   [0980] (a) tau phosphorylated at T217, but not at T212 or T214, or
   [0981] (b) peptides comprising or consisting of the sequences GTPGSRSRTPSLP(pT)PPTRE (SEQ ID NO: 2155) and GTPGSRSRTP(pS)LP(pT)PPTRE (SEQ ID NO: 2158), but not peptides comprising or consisting of the sequences GTPGSRSR(pT)PSLPTPPTRE (SEQ ID NO: 2153), GTPGSRSRTP(pS)LPTPPTRE (SEQ ID NO: 2154), and GTPGSRSR(pT)P(pS)LPTPPTRE (SEQ ID NO: 2156),
   [0982] wherein p(S) and p(T) correspond to a phosphorylated serine and phosphorylated threonine, respectively,
   [0983] optionally wherein binding of the antibody to tau or the peptide is at least 1.5 times stronger (e.g., at least 1.6 times, at least 1.7 times, at least 1.8 times, at least 1.9 times, at least 2 times, at least 3 times, at least 4 times, at least 5 times, at least 6 times, 1.5-4 times, 1.5-3, 4-6 times stronger) than background (non-specific) level of binding, e.g., binding by hIgG1 isotype control),
   [0984] optionally wherein binding of the antibody to tau or the peptide is assessed, e.g., using one point ELISA as described, e.g., in Example 8, and optionally wherein human tau has the sequence set forth in SEQ ID NO: 9200, and
   [0985] optionally wherein the antibody molecule comprises:
   [0986] (i) a heavy chain variable region (VH) comprising HCDR1, HCDR2, and HCDR3 sequences comprising SEQ ID NOs: 2232, 2233, and 2234, respectively, and a light chain variable region (VL) comprising LCDR1, LCDR2, and LCDR3 sequences comprising SEQ ID NOs: 2238, 2239, and 2240, respectively;
   [0987] (ii) a heavy chain variable region (VH) comprising HCDR1, HCDR2, and HCDR3 sequences comprising SEQ ID NOs: 2284, 2392, and 2393, respectively, and a light chain variable region (VL) comprising LCDR1, LCDR2, and LCDR3 sequences comprising SEQ ID NOs: 2404, 2405, and 2406, respectively; or
   [0988] (iii) a heavy chain variable region (VH) comprising HCDR1, HCDR2, and HCDR3 sequences comprising SEQ ID NOs: 2445, 2446, and 2447, respectively, and a light chain variable region (VL) comprising LCDR1, LCDR2, and LCDR3 sequences comprising SEQ ID NOs: 2452, 2421, and 2453, respectively.
[0989] 418. The isolated AAV particle of any one of embodiments 1-376 or 407-417, wherein the antibody molecule comprises a heavy chain variable region (VH) comprising one, two, or three of a heavy chain complementary determining region 1 (HCDR1), a heavy chain complementary determining region 2 (HCDR2), and a heavy chain complementary determining region 3 (HCDR3), and/or a light chain variable region (VL) comprising one, two, or three of a light chain complementary determining region 1 (LCDR1), a light chain complementary determining region 2 (LCDR2), and a light chain complementary determining region 3 (LCDR3), e.g., CDR sequences according to the Chothia numbering system, wherein:
   [0990] (i) the HCDR1, HCDR2, HCDR3, LCDR1, LCDR2, and LCDR3 comprise the amino acid sequences of SEQ ID NOs: 2200, 2201, 2202, 2207, 2208, and 2209, respectively;
   [0991] (ii) the HCDR1, HCDR2, HCDR3, LCDR1, LCDR2, and LCDR3 comprise the amino acid sequences of SEQ ID NOs: 2232, 2233, 2234, 2238, 2239, and 2240, respectively;
   [0992] (iii) the HCDR1, HCDR2, HCDR3, LCDR1, LCDR2, and LCDR3 comprise the amino acid sequences of SEQ ID NOs: 2248, 2219, 2249, 2207, 2208, and 2224, respectively;
   [0993] (iv) the HCDR1, HCDR2, HCDR3, LCDR1, LCDR2, and LCDR3 comprise the amino acid sequences of SEQ ID NOs: 2218, 2219, 2220, 2207, 2208, and 2224, respectively;
   [0994] (v) the HCDR1, HCDR2, HCDR3, LCDR1, LCDR2, and LCDR3 comprise the amino acid sequences of SEQ ID NOs: 2200, 2257, 2258, 2262, 2263, and 2264, respectively;
   [0995] (vi) the HCDR1, HCDR2, HCDR3, LCDR1, LCDR2, and LCDR3 comprise the amino acid sequences of SEQ ID NOs: 2415, 2416, 2417, 2420, 2421, and 2422, respectively;
   [0996] (vii) the HCDR1, HCDR2, HCDR3, LCDR1, LCDR2, and LCDR3 comprise the amino acid sequences of SEQ ID NOs: 2273, 2274, 2275, 2207, 2208, and 2277, respectively;
   [0997] (viii) the HCDR1, HCDR2, HCDR3, LCDR1, LCDR2, and LCDR3 comprise the amino acid sequences of SEQ ID NOs: 2284, 2285, 2286, 2289, 2290, and 2291, respectively;
   [0998] (ix) the HCDR1, HCDR2, HCDR3, LCDR1, LCDR2, and LCDR3 comprise the amino acid sequences of SEQ ID NOs: 2284, 2299, 2300, 2302, 2303, and 2304, respectively;
   [0999] (x) the HCDR1, HCDR2, HCDR3, LCDR1, LCDR2, and LCDR3 comprise the amino acid sequences of SEQ ID NOs: 2313, 2314, 2315, 2319, 2320, and 2321, respectively;
   [1000] (xi) the HCDR1, HCDR2, HCDR3, LCDR1, LCDR2, and LCDR3 comprise the amino acid sequences of SEQ ID NOs: 2330, 2331, 2332, 2262, 2336, and 2337, respectively;
   [1001] (xii) the HCDR1, HCDR2, HCDR3, LCDR1, LCDR2, and LCDR3 comprise the amino acid sequences of SEQ ID NOs: 2345, 2346, 2347, 2351, 2352, and 2353, respectively;
   [1002] (xiii) the HCDR1, HCDR2, HCDR3, LCDR1, LCDR2, and LCDR3 comprise the amino acid sequences of SEQ ID NOs: 2345, 2346, 2347, 2361, 2362, and 2363, respectively;
   [1003] (xiv) the HCDR1, HCDR2, HCDR3, LCDR1, LCDR2, and LCDR3 comprise the amino acid sequences of SEQ ID NOs: 2371, 2372, 2373, 2207, 2208, and 2224, respectively;
   [1004] (xv) the HCDR1, HCDR2, HCDR3, LCDR1, LCDR2, and LCDR3 comprise the amino acid sequences of SEQ ID NOs: 2381, 2382, 2383, 2262, 2263, and 2385, respectively;
   [1005] (xvi) the HCDR1, HCDR2, HCDR3, LCDR1, LCDR2, and LCDR3 comprise the amino acid sequences of SEQ ID NOs: 2284, 2392, 2393, 2396, 2239, and 2397, respectively;
   [1006] (xvii) the HCDR1, HCDR2, HCDR3, LCDR1, LCDR2, and LCDR3 comprise the amino acid sequences of SEQ ID NOs: 2284, 2392, 2393, 2404, 2405, and 2406, respectively;
   [1007] (xviii) the HCDR1, HCDR2, HCDR3, LCDR1, LCDR2, and LCDR3 comprise the amino acid sequences of SEQ ID NOs: 2430, 2431, 2432, 2435, 2436, and 2437, respectively;
   [1008] (xix) the HCDR1, HCDR2, HCDR3, LCDR1, LCDR2, and LCDR3 comprise the amino acid sequences of SEQ ID NOs: 2445, 2446, 2447, 2452, 2421, and 2453, respectively;
   [1009] (xx) the HCDR1, HCDR2, HCDR3, LCDR1, LCDR2, and LCDR3 comprise the amino acid sequences of SEQ ID NOs: 2459, 2460, 2461, 2465, 2466, and 2467, respectively;
   [1010] (xxi) the HCDR1, HCDR2, HCDR3, LCDR1, LCDR2, and LCDR3 comprise the amino acid sequences of any of the HCDR and LCDR sequences provided in Tables 14-16; or
   [1011] (xxii) a variant, e.g., functional variant, of the antibodies of any one of (i)-(xxi), wherein any one, two, three, four, five or all of the HCDR1, HCDR2, HCDR3, LCDR1, LCDR2, and/or LCDR3 comprises one, two, or at most three substitutions (e.g., conservative substitutions); or wherein any one, two, three, four, five or all of the HCDR1, HCDR2, HCDR3, LCDR1, LCDR2, and/or LCDR3 comprises one, two, or at most three different amino acids relative to any of the sequences in (i)-(xxi).
[1012] 419. The isolated AAV particle of embodiment 418, wherein the antibody molecule comprises the HCDR1, HCDR2, HCDR3, LCDR1, LCDR2, and LCDR3 sequences of any one of (i)-(xxii).
[1013] 420. The isolated AAV particle of embodiment 1-376 or 407-419, wherein the antibody molecule comprises:
   [1014] (a) the HCDR1, HCDR2, HCDR3, LCDR1, LCDR2, and LCDR3 comprise the amino acid sequences of SEQ ID NOs: 2248, 2219, 2249, 2207, 2208, and 2224, respectively;
   [1015] (b) the HCDR1, HCDR2, HCDR3, LCDR1, LCDR2, and LCDR3 comprise the amino acid sequences of SEQ ID NOs: 2200, 2201, 2202, 2207, 2208, and 2209, respectively;
   [1016] (c) the HCDR1, HCDR2, HCDR3, LCDR1, LCDR2, and LCDR3 comprise the amino acid sequences of SEQ ID NOs: 2232, 2233, 2234, 2238, 2239, and 2240, respectively;
   [1017] (d) the HCDR1, HCDR2, HCDR3, LCDR1, LCDR2, and LCDR3 comprise the amino acid sequences of SEQ ID NOs: 2218, 2219, 2220, 2207, 2208, and 2224, respectively;
   [1018] (e) the HCDR1, HCDR2, HCDR3, LCDR1, LCDR2, and LCDR3 comprise the amino acid sequences of SEQ ID NOs: 2415, 2416, 2417, 2420, 2421, and 2422, respectively; or
   [1019] (f) the HCDR1, HCDR2, HCDR3, LCDR1, LCDR2, and LCDR3 comprise the amino acid sequences of SEQ ID NOs: 2200, 2257, 2258, 2262, 2263, and 2264, respectively.
[1020] 421. The isolated AAV particle of any one of embodiments 1-376 or 407-420, wherein the antibody molecule comprises a heavy chain CDR1, CDR2, and CDR3, and/or a light chain CDR1, CDR2, and CDR3 of an antibody molecule comprising a heavy chain variable region (VH) and light chain variable region (VL) comprising: (i) SEQ ID NOs: 2214 and 2215, respectively; (ii) SEQ ID NOs: 2244 and 2245, respectively; (iii) SEQ ID NOs: 2253 and 2254, respectively; (iv) SEQ ID NOs: 2228 and 2229, respectively; (v) SEQ ID NOs: 2269 and 2270, respectively; (vi) SEQ ID NOs: 2426 and 2427, respectively; (vii) SEQ ID NOs: 2280 and 2281, respectively; (viii) SEQ ID NOs: 2295 and 2296, respectively; (ix) SEQ ID NOs: 2309 and 2310, respectively; (x) SEQ ID NOs: 2326 and 2327, respectively; (xi) SEQ ID NOs: 2341 and 2342, respectively; (xii) SEQ ID NOs: 2357 and 2358, respectively; (xiii) SEQ ID NOs: 2367 and 2368, respectively; (xiv) SEQ ID NOs: 2377 and 2378, respectively; (xv) SEQ ID NOs: 2388 and 2389, respectively; (xvi) SEQ ID NOs: 2400 and 2401, respectively; (xvii) SEQ ID NOs: 2411 and 2412, respectively; (xviii) SEQ ID NOs: 2441 and 2442, respectively; (xix) SEQ ID NOs: 2455 and 2456, respectively; or (xx) SEQ ID NOs: 2470 and 2471, respectively.
[1021] 422. The isolated AAV particle of embodiment 421, wherein the CDR sequences are based on the Kabat numbering system, Chothia numbering system, or IMGT numbering system.
[1022] 423. The isolated AAV particle of any one of embodiments 1-376 or 407-422, wherein the antibody molecule comprises a VH comprising:
   [1023] (i) the amino acid sequence of any VH provided in Table 14 or 15, or an amino acid sequence having at least 70%, 75%, 80%, 85%, 90%, 92%, 95%, 96%, 97%, 98%, or 99% sequence identity thereto;
   [1024] (ii) an amino acid sequence comprising at least one, two or three modifications, but not more than 30, 20 or 10 modifications relative to the amino acid sequence of any VH provided in Table 14 or 15;
   [1025] (iii) an amino acid sequence comprising at least one, two or three, but not more than 30, 20 or 10 different amino acids relative to any one of the amino acid sequences of any VH sequences provided in Table 14 or 15; or
   [1026] (iv) an amino acid sequence encoded by a nucleotide sequence of any VH provided in Table 14 or 15, or a nucleotide sequence having at least 70%, 75%, 80%, 85%, 90%, 92%, 95%, 96%, 97%, 98%, or 99% sequence identity thereto.
[1027] 424. The isolated AAV particle of any one of embodiments 1-376 or 407-423, wherein the antibody molecule comprises a VH comprising:
   [1028] (i) the amino acid sequence of any of SEQ ID NOs: 2253, 2214, 2244, 2228, 2426, and 2269, or an amino acid sequence having at least 70%, 75%, 80%, 85%, 90%, 92%, 95%, 96%, 97%, 98%, or 99% sequence identity thereto;
   [1029] (ii) an amino acid sequence comprising at least one, two or three modifications, but not more than 30, 20 or 10 modifications of the amino acid sequence of any of SEQ ID NOs: 2253, 2214, 2244, 2228, 2426, and 2269;
   [1030] (iii) an amino acid sequence comprising at least one, two or three, but not more than 30, 20 or 10 different amino acids relative to any one of the amino acid sequences of any of SEQ ID NOs: 2253, 2214, 2244, 2228, 2426, and 2269; or
   [1031] (iv) an amino acid sequence encoded by a nucleotide sequence of any of SEQ ID NOs: 2255, 2216, 2246, 2230, 2428, and 2271, or a nucleotide sequence having at least 70%, 75%, 80%, 85%, 90%, 92%, 95%, 96%, 97%, 98%, or 99% sequence identity thereto.
[1032] 425. The isolated AAV particle of any one of embodiments 1-376 or 407-424, wherein the antibody molecule comprises a VL comprising:
   [1033] (i) the amino acid sequence of any VL provided in Table 14 or 15, or an amino acid sequence having at least 70%, 75%, 80%, 85%, 90%, 92%, 95%, 96%, 97%, 98%, or 99% sequence identity thereto;
   [1034] (ii) an amino acid sequence comprising at least one, two or three modifications, but not more than 30, 20 or 10 modifications relative to the amino acid sequence of any VL provided in Table 14 or 15;
   [1035] (iii) an amino acid sequence comprising at least one, two or three, but not more than 30, 20 or 10 different amino acids relative to any one of the amino acid sequences of any VL sequences provided in Table 14 or 15; or
   [1036] (iv) an amino acid sequence encoded by a nucleotide sequence of any VL provided in Table 14 or 15, or a nucleotide sequence having at least 70%, 75%, 80%, 85%, 90%, 92%, 95%, 96%, 97%, 98%, or 99% sequence identity thereto.
[1037] 426. The isolated AAV particle of any one of embodiments 1-376 or 407-425, wherein the antibody molecule comprises a VL comprising:
   [1038] (i) the amino acid sequence of any of SEQ ID NOs: 2254, 2215, 2245, 2229, 2427, and 2270, or an amino acid sequence having at least 70%, 75%, 80%, 85%, 90%, 92%, 95%, 96%, 97%, 98%, or 99% sequence identity thereto;
   [1039] (ii) an amino acid sequence comprising at least one, two or three modifications, but not more than 30, 20 or 10 modifications of the amino acid sequence of any of SEQ ID NOs: 2254, 2215, 2245, 2229, 2427, and 2270;
   [1040] (iii) an amino acid sequence comprising at least one, two or three, but not more than 30, 20 or 10 different amino acids relative to any one of the amino acid sequences of any of SEQ ID NOs: 2254, 2215, 2245, 2229, 2427, and 2270; or
   [1041] (iv) an amino acid sequence encoded by a nucleotide sequence of any of SEQ ID NOs: 2256, 2217, 2247, 2231, 2429, and 2272, or a nucleotide sequence having at least 70%, 75%, 80%, 85%, 90%, 92%, 95%, 96%, 97%, 98%, or 99% sequence identity thereto.
[1042] 427. The isolated AAV particle of any one of embodiments 1-376 or 407-426, wherein the antibody molecule comprises:
[1043] (i) a VH comprising:
   [1044] (a) the amino acid sequence of any VH provided in Table 14 or 15, or an amino acid sequence having at least 70%, 75%, 80%, 85%, 90%, 92%, 95%, 96%, 97%, 98%, or 99% sequence identity thereto;
   [1045] (b) an amino acid sequence comprising at least one, two or three modifications, but not more than 30, 20 or 10 modifications relative to the amino acid sequence of any VH provided in Table 14 or 15;
   [1046] (c) an amino acid sequence comprising at least one, two or three, but not more than 30, 20 or 10 different amino acids relative to any one of the amino acid sequences of any VH sequences provided in Table 14 or 15; or
   [1047] (d) an amino acid sequence encoded by a nucleotide sequence of any VH provided in Table 14 or 15, or a nucleotide sequence having at least 70%, 75%, 80%, 85%, 90%, 92%, 95%, 96%, 97%, 98%, or 99% sequence identity thereto; and
[1048] (ii) a VL comprising:
   [1049] (a) the amino acid sequence of any VL provided in Table 14 or 15, or an amino acid sequence having at least 70%, 75%, 80%, 85%, 90%, 92%, 95%, 96%, 97%, 98%, or 99% sequence identity thereto;
   [1050] (b) an amino acid sequence comprising at least one, two or three modifications, but not more than 30, 20 or 10 modifications relative to the amino acid sequence of any VL provided in Table 14 or 15;
   [1051] (c) an amino acid sequence comprising at least one, two or three, but not more than 30, 20 or 10 different amino acids relative to any one of the amino acid sequences of any VL sequences provided in Table 14 or 15; or
   [1052] (d) an amino acid sequence encoded by a nucleotide sequence of any VL provided in Table 14 or 15, or a nucleotide sequence having at least 70%, 75%, 80%, 85%, 90%, 92%, 95%, 96%, 97%, 98%, or 99% sequence identity thereto.
[1053] 428. The isolated AAV particle of any one of embodiments 1-376 or 407-427, wherein the antibody molecule comprises the amino acid sequence of any VH of an antibody provided in Table 14 or 15, and the amino acid sequence of the VL of the antibody provided in Table 14 or 15.
[1054] 429. The isolated AAV particle of any one of embodiments 1-376 or 407-428, wherein the antibody molecule comprises:
   [1055] (i) a VH comprising the amino acid sequence of SEQ ID NO: 2253; an amino acid sequence having at least 70%, 75%, 80%, 85%, 90%, 92%, 95%, 96%, 97%, 98%, or 99% sequence identity thereto; an amino acid sequence comprising at least one, two or three, but not more than 30, 20 or 10 different amino acids relative to SEQ ID NO: 2253; or an amino acid sequence comprising at least one, two or three, but not more than 30, 20 or 10 modifications, e.g., substitutions (e.g., conservative substitutions) relative to SEQ ID NO: 2253; and
   [1056] (ii) a VL comprising the amino acid sequence of SEQ ID NO: 2254, or an amino acid sequence having at least 70%, 75%, 80%, 85%, 90%, 92%, 95%, 96%, 97%, 98%, or 99% sequence identity thereto; an amino acid sequence comprising at least one, two or three, but not more than 30, 20 or 10 different amino acids relative to SEQ ID NO: 2254; or an amino acid sequence comprising at least one, two or three, but not more than 30, 20 or 10 modifications, e.g., substitutions (e.g., conservative substitutions) relative to SEQ ID NO: 2254.
[1057] 430. The isolated AAV particle of any one of embodiments 1-376 or 407-428, wherein the antibody molecule comprises:
   [1058] (i) a VH comprising the amino acid sequence of SEQ ID NO: 2214; an amino acid sequence having at least 70%, 75%, 80%, 85%, 90%, 92%, 95%, 96%, 97%, 98%, or 99% sequence identity thereto; an amino acid sequence comprising at least one, two or three, but not more than 30, 20 or 10 different amino acids relative to SEQ ID NO: 2214; or an amino acid sequence comprising at least one, two or three, but not more than 30, 20 or 10 modifications, e.g., substitutions (e.g., conservative substitutions) relative to SEQ ID NO: 2214; and
   [1059] (ii) a VL comprising the amino acid sequence of SEQ ID NO: 2215, or an amino acid sequence having at least 70%, 75%, 80%, 85%, 90%, 92%, 95%, 96%, 97%, 98%, or 99% sequence identity thereto; an amino acid sequence comprising at least one, two or three, but not more than 30, 20 or 10 different amino acids relative to SEQ ID NO: 2215; or an amino acid sequence comprising at least one, two or three, but not more than 30, 20 or 10 modifications, e.g., substitutions (e.g., conservative substitutions) relative to SEQ ID NO: 2215.
[1060] 431. The isolated AAV particle of any one of embodiments 1-376 or 407-428, wherein the antibody molecule comprises:
   [1061] (i) a VH comprising the amino acid sequence of SEQ ID NO: 2244; an amino acid sequence having at least 70%, 75%, 80%, 85%, 90%, 92%, 95%, 96%, 97%, 98%, or 99% sequence identity thereto; an amino acid sequence comprising at least one, two or three, but not more than 30, 20 or 10 different amino acids relative to SEQ ID NO: 2244; or an amino acid sequence comprising at least one, two or three, but not more than 30, 20 or 10 modifications, e.g., substitutions (e.g., conservative substitutions) relative to SEQ ID NO: 2244; and
   [1062] (ii) a VL comprising the amino acid sequence of SEQ ID NO: 2245, or an amino acid sequence having at least 70%, 75%, 80%, 85%, 90%, 92%, 95%, 96%, 97%, 98%, or 99% sequence identity thereto; an amino acid sequence comprising at least one, two or three, but not more than 30, 20 or 10 different amino acids relative to SEQ ID NO: 2245; or an amino acid sequence comprising at least one, two or three, but not more than 30, 20 or 10 modifications, e.g., substitutions (e.g., conservative substitutions) relative to SEQ ID NO: 2245.
[1063] 432. The isolated AAV particle of any one of embodiments 1-376 or 407-428, wherein the antibody molecule comprises:
   [1064] (i) a VH comprising the amino acid sequence of SEQ ID NO: 2228; an amino acid sequence having at least 70%, 75%, 80%, 85%, 90%, 92%, 95%, 96%, 97%, 98%, or 99% sequence identity thereto; an amino acid sequence comprising at least one, two or three, but not more than 30, 20 or 10 different amino acids relative to SEQ ID NO: 2228; or an amino acid sequence comprising at least one, two or three, but not more than 30, 20 or 10 modifications, e.g., substitutions (e.g., conservative substitutions) relative to SEQ ID NO: 2228; and
   [1065] (ii) a VL comprising the amino acid sequence of SEQ ID NO: 2229, or an amino acid sequence having at least 70%, 75%, 80%, 85%, 90%, 92%, 95%, 96%, 97%, 98%, or 99% sequence identity thereto; an amino acid sequence comprising at least one, two or three, but not more than 30, 20 or 10 different amino acids relative to SEQ ID NO: 2229; or an amino acid sequence comprising at least one, two or three, but not more than 30, 20 or 10 modifications, e.g., substitutions (e.g., conservative substitutions) relative to SEQ ID NO: 2229.
[1066] 433. The isolated AAV particle of any one of embodiments 1-376 or 407-428, wherein the antibody molecule comprises:
   [1067] (i) a VH comprising the amino acid sequence of SEQ ID NO: 2269; an amino acid sequence having at least 70%, 75%, 80%, 85%, 90%, 92%, 95%, 96%, 97%, 98%, or 99% sequence identity thereto; an amino acid sequence comprising at least one, two or three, but not more than 30, 20 or 10 different amino acids relative to SEQ ID NO: 2269; or an amino acid sequence comprising at least one, two or three, but not more than 30, 20 or 10 modifications, e.g., substitutions (e.g., conservative substitutions) relative to SEQ ID NO: 2269; and
   [1068] (ii) a VL comprising the amino acid sequence of SEQ ID NO: 2270, or an amino acid sequence having at least 70%, 75%, 80%, 85%, 90%, 92%, 95%, 96%, 97%, 98%, or 99% sequence identity thereto; an amino acid sequence comprising at least one, two or three, but not more than 30, 20 or 10 different amino acids relative to SEQ ID NO: 2270; or an amino acid sequence comprising at least one, two or three, but not more than 30, 20 or 10 modifications, e.g., substitutions (e.g., conservative substitutions) relative to SEQ ID NO: 2270.
[1069] 434. The isolated AAV particle of any one of embodiments 1-376 or 407-428, wherein the antibody molecule comprises:
   [1070] (i) a VH comprising the amino acid sequence of SEQ ID NO: 2426; an amino acid sequence having at least 70%, 75%, 80%, 85%, 90%, 92%, 95%, 96%, 97%, 98%, or 99% sequence identity thereto; an amino acid sequence comprising at least one, two or three, but not more than 30, 20 or 10 different amino acids relative to SEQ ID NO: 2426; or an amino acid sequence comprising at least one, two or three, but not more than 30, 20 or 10 modifications, e.g., substitutions (e.g., conservative substitutions) relative to SEQ ID NO: 2426; and
   [1071] (ii) a VL comprising the amino acid sequence of SEQ ID NO: 2427, or an amino acid sequence having at least 70%, 75%, 80%, 85%, 90%, 92%, 95%, 96%, 97%, 98%, or 99% sequence identity thereto; an amino acid sequence comprising at least one, two or three, but not more than 30, 20 or 10 different amino acids relative to SEQ ID NO: 2427; or an amino acid sequence comprising at least one, two or three, but not more than 30, 20 or 10 modifications, e.g., substitutions (e.g., conservative substitutions) relative to SEQ ID NO: 2427.
[1072] 435. The isolated AAV particle of any one of embodiments 1-376 or 407-434, wherein the antibody molecule comprises a heavy chain variable region (VH) and/or a light chain variable region (VL) comprising: (i) SEQ ID NOs: 2214 and 2215, respectively; (ii) SEQ ID NOs: 2244 and 2245, respectively; (iii) SEQ ID NOs: 2253 and 2254, respectively; (iv) SEQ ID NOs: 2228 and 2229, respectively; (v) SEQ ID NOs: 2269 and 2270, respectively; (vi) SEQ ID NOs: 2426 and 2427, respectively; (vii) SEQ ID NOs: 2280 and 2281, respectively; (viii) SEQ ID NOs: 2295 and 2296, respectively; (ix) SEQ ID NOs: 2309 and 2310, respectively; (x) SEQ ID NOs: 2326 and 2327, respectively; (xi) SEQ ID NOs: 2341 and 2342, respectively; (xii) SEQ ID NOs: 2357 and 2358, respectively; (xiii) SEQ ID NOs: 2367 and 2368, respectively; (xiv) SEQ ID NOs: 2377 and 2378, respectively; (xv) SEQ ID NOs: 2388 and 2389, respectively; (xvi) SEQ ID NOs: 2400 and 2401, respectively; (xvii) SEQ ID NOs: 2411 and 2412, respectively; (xviii) SEQ ID NOs: 2441 and 2442, respectively; (xix) SEQ ID NOs: 2455 and 2456, respectively; (xx) SEQ ID NOs: 2470 and 2471, respectively, (xxi) a variant, e.g., functional variant, of the antibodies of any one of (i)-(xx), wherein the VH and/or VL has an amino acid sequence having at least 70%, 75%, 80%, 85%, 90%, 92%, 95%, 96%, 97%, 98%, or 99% sequence identity thereto; or (xxii) a variant, e.g., functional variant, of the antibodies of any one of (i)-(xx), wherein the VH and/or VL comprises at least one, two, or three modifications, but not more than 30, 20, or 10 modifications (e.g., amino acid substitutions, e.g., conservative substitutions) or wherein the VH and/or VL comprises at least one, two, or three, but not more than 30, 20, or 10 different amino acids.
[1073] 436. The isolated AAV particle of embodiment 435, wherein the antibody molecule comprises the VH and VL sequences of any one of (i)-(xxii).
[1074] 437. The isolated AAV particle of any one of embodiments 1-376 or 407-436, wherein the antibody molecule comprises VH and VL sequences comprising the amino acid sequences of:
   [1075] (a) SEQ ID NOs: 2253 and 2254, respectively,
   [1076] (b) SEQ ID NOs: 2214 and 2215, respectively,
   [1077] (c) SEQ ID NOs: 2244 and 2245, respectively,
   [1078] (d) SEQ ID NOs: 2228 and 2229, respectively,
   [1079] (e) SEQ ID NOs: 2426 and 2427, respectively, or
   [1080] (f) SEQ ID NOs: 2269 and 2270, respectively.
[1081] 438. The isolated AAV particle of embodiment 1-376 or 407-437, wherein the antibody molecule comprises a VH sequence encoded by a nucleotide sequence having at least 80% (e.g., 85, 90, 95, 96, 97, 98, or 99%) sequence identity to any one of SEQ ID NOs: 2255, 2216, 2246, 2230, 2428, 2271, 2282, 2297, 2311, 2328, 2343, 2359, 2369, 2379, 2390, 2402, 2413, 2443, 2457, or 2472 and/or a VL sequence encoded by a nucleotide sequence having at least 80% (e.g., 85, 90, 95, 96, 97, 98, or 99%) sequence identity to any one of SEQ ID NOs: 2256, 2217, 2247, 2231, 2429, 2272, 2283, 2298, 2312, 2329, 2344, 2360, 2370, 2380, 2391, 2403, 2414, 2444, 2458, or 2473.
[1082] 439. The isolated AAV particle of embodiment 438, wherein the antibody molecule comprises VH and VL sequences encoded by nucleotide sequences set forth in (a) SEQ ID NOs: 2255 and 2256, respectively, (b) SEQ ID NOs: 2216 and 2217, respectively, (c) SEQ ID NOs: 2246 and 2247, respectively, (d) SEQ ID NOs: 2230 and 2231, respectively, (e) SEQ ID NOs: 2428 and 2429, respectively, (f) SEQ ID NOs: 2271 and 2272, respectively, (g) SEQ ID NOs: 2282 and 2283, respectively, (h) SEQ ID NOs: 2297 and 2298, respectively, (i) SEQ ID NOs: 2311 and 2312, respectively, (j) SEQ ID NOs: 2328 and 2329, respectively, (k) SEQ ID NOs: 2343 and 2344, respectively, (1) SEQ ID NOs: 2359 and 2360, respectively, (m) SEQ ID NOs: 2369 and 2370, respectively, (n) SEQ ID NOs: 2379 and 2380, respectively, (o) SEQ ID NOs: 2390 and 2391, respectively, (p) SEQ ID NOs: 2402 and 2403, respectively, (q) SEQ ID NOs: 2413 and 2414, respectively, (r) SEQ ID NOs: 2443 and 2444, respectively, (s) SEQ ID NOs: 2457 and 2458, respectively, (t) SEQ ID NOs: 2472 and 2473, respectively, or (u) a nucleotide sequence having at least 80% (e.g., 85, 90, 95, 96, 97, 98, or 99%) sequence identity to any one of (a)-(t).
[1083] 440. The isolated AAV particle of any one of embodiments 1-439, wherein the antibody molecule comprises:
   [1084] (i) a heavy chain constant region comprising an amino acid sequence of any of the heavy chain constant region sequences in Table 17, or a sequence having at least 80% (e.g., 85, 90, 95, 96, 97, 98, or 99%) sequence identity to the heavy chain constant region sequences in Table 17, or an amino acid sequence having at least one, two or three modifications, but not more than 30, 20 or 10 modifications, to the amino acid sequence of the heavy chain constant region sequences in Table 17; and/or
   [1085] (ii) a light chain constant region (CL) comprising an amino acid sequence of any of the CL sequences in Table 17, or a sequence having at least 80% (e.g., 85, 90, 95, 96, 97, 98, or 99%) sequence identity to any of the CL sequences in Table 17, or an amino acid sequence having at least one, two or three modifications, but not more than 30, 20 or 10 modifications, to the amino acid sequence of the light chain constant region sequences in Table 17.
[1086] 441. The isolated AAV particle of any one of embodiments 1-440, wherein the antibody molecule comprises:
   [1087] (i) a heavy chain (HC) comprising the amino acid sequence of the HC of any one of the anti-tau antibody molecules described herein (e.g., the HC of any one of the anti-tau antibody molecules listed in Tables 7-16), or a sequence having at least 80% (e.g., 85, 90, 95, 96, 97, 98, or 99%) sequence identity to the HC sequence of any of the anti-tau antibody molecules described herein (e.g., the HC of any one of the anti-tau antibody molecules listed in Tables 7-16), or an amino acid sequence having at least one, two or three modifications, but not more than 30, 20 or 10 modifications, to the amino acid sequence of the HC sequence of any of the anti-tau antibody molecules described herein (e.g., the HC of any one of the anti-tau antibody molecules listed in Tables 7-16); and/or
   [1088] (ii) a light chain (LC) comprising the amino acid sequence of the LC of any of any one of the anti-tau antibody molecules described herein (e.g., the LC of any one of the anti-tau antibody molecules listed in Tables 7-16), or a sequence having at least 80% (e.g., 85, 90, 95, 96, 97, 98, or 99%) sequence identity to the LC sequence of any of the anti-tau antibody molecules described herein (e.g., the LC of any one of the anti-tau antibody molecules listed in Tables 7-16), or an amino acid sequence having at least one, two or three modifications, but not more than 30, 20 or 10 modifications, to the amino acid sequence of the LC sequence of any of the anti-tau antibody molecules described herein (e.g., the LC of any one of the anti-tau antibody molecules listed in Tables 7-16).
[1089] 442. The isolated AAV particle of any one of embodiments 1-441, wherein the antibody molecule competes for binding to tau with an antibody as defined in any one of embodiments 167-198.
[1090] 443. The isolated AAV particle of any one of embodiments 1-442, wherein the antibody molecule binds to the same epitope, substantially the same epitope as, an epitope that overlaps with, or an epitope that substantially overlaps with an antibody as defined in any one of embodiments 167-198.
[1091] 444. The isolated AAV particle of any one of embodiments 1-443, wherein the antibody molecule is a full length antibody, a bispecific antibody, a Fab, a F(ab′)2, a Fv, a single chain Fv fragment (scFv), single domain antibody, or a camelid antibody.
[1092] 445. The isolated AAV particle of any one of embodiments 1-444, wherein the antibody molecule comprises a heavy chain constant region selected from human IgG1, human IgG2, human IgG3, human IgG4, murine IgG1, murine IgG2a, murine IgG2b, murine IgG2c, and murine IgG3; and/or a light chain constant region selected from the light chain constant regions of kappa or lambda.
[1093] 446. The isolated AAV particle of any one of embodiments 1-445, wherein the antibody molecule comprises an Fc region or functional variant thereof.
[1094] 447. The isolated AAV particle of any one of embodiments 1-446, wherein the antibody molecule comprises an Fc region which has reduced affinity, e.g., ablated, affinity for an Fc receptor, e.g., as compared to a reference, wherein the reference is a wild-type Fc receptor.
[1095] 448. The isolated AAV particle of any one of embodiments 1-447, wherein the antibody molecule comprises an Fc region which comprises a mutation at one, two, or all of positions I253 (e.g., I235A), H310 (e.g., H310A or H310Q), and/or H435 (e.g., H435A or H435Q), numbered according to the EU index as in Kabat.
[1096] 449. The isolated AAV particle of any one of embodiments 1-448, wherein the antibody molecule comprises an Fc region which has reduced effector function (e.g., reduced ADCC), compared to a reference wherein the reference is a wild-type Fc receptor.
[1097] 450. The isolated AAV particle of any one of embodiments 1-449, wherein the antibody molecule comprises an Fc region which comprises a mutation at one, two, three, four, or all of positions L235 (e.g., L235V), F243 (e.g., F243L), R292 (e.g., R292P), Y300 (e.g., Y300L), and P396 (e.g., P396L), numbered according to the EU index as in Kabat.
[1098] 451. The isolated AAV particle of any one of embodiments 1-450, wherein the antibody molecule comprises a signal sequence.
[1099] 452. The isolated AAV particle of embodiment 451, wherein, in the antibody molecule,
   [1100] (i) the signal sequence is located 5′ relative to the VH and/or the heavy chain; and/or
   [1101] (ii) the signal sequence is located 5′ relative to the VL and/or the light chain.
[1102] 453. The isolated AAV particle of any one of embodiments 1-367, wherein the antibody molecule is selected from E2814, semorinemab (RG6100, R07105705, MTAU9937A), gosuranemab (BIIB092, BMS-986168, IPN007/IPN002), tilavonemab (ABBV-8E12, C2N-8E12, HJ8.5), zagotenemab (LY3303560, MC-1 IgG1), posdinemab (JNJ-63733657, B296, PT3), bepranemab (UCB0107), BIIB076 (N1-105.6C5 huIgG1λ), RG7345 (R06926496), UCB0107 (D IgG4), NPT088, PNT001, Lu AF87908, PRX005, or APNmAb005.
[1103] 454. The isolated AAV particle of any one of embodiments 1-453, wherein, in the antibody molecule,
   [1104] (i) the VH and VL are connected directly, e.g., without a linker;
   [1105] (ii) the VH and VL are connected via a linker (e.g., a linker listed in Table 19);
   [1106] (iii) the heavy chain and light chain are connected directly, e.g., without a linker; or
   [1107] (iv) the heavy chain and light chain are connected via a linker (e.g., a linker listed in Table 19).
[1108] 455. The isolated AAV particle of embodiment 454, wherein:
   [1109] (i) the linker comprises an encoded furin cleavage site;
   [1110] (ii) the linker comprises an encoded T2A linker; and/or
   [1111] (iii) the linker comprises a glycine-serine linker, e.g., a G4S linker or a (G4S)3 linker.
[1112] 456. The isolated AAV particle of any one of embodiments 1-455, wherein the antibody molecule comprises a second antigen-binding region having a different binding specificity than the antigen-binding region that binds to tau.
[1113] 457. The isolated AAV particle of any one of embodiments 1-456, wherein the antibody molecule is a multispecific antibody molecule comprising at least a first antigen-binding domain and a second antigen-binding domain, e.g., a bispecific antibody molecule.
[1114] 458. The isolated AAV particle of embodiment 1-457, wherein the first and/or second antigen binding domain of the antibody molecule comprise an IgG antibody, single-chain Fv (scFv), a scFv fragment, a Fab, an F(ab′)₂, a single-chain Fab (scFabs), a single-chain antibody, a diabody, a bispecific antibody, an antibody variable domain, a VHH, a single domain antibody, a camelid antibody, an intrabody, and/or a nanobody.
[1115] 459. The isolated AAV particle of any one of the preceding embodiments, which comprises a viral genome comprising a promoter operably linked to the nucleic acid sequence encoding the antibody molecule, wherein the promoter comprises a tissue specific promoter or a ubiquitous promoter.
[1116] 460. The isolated AAV particle of embodiment 459, wherein the promoter is chosen from human elongation factor 1α-subunit (EF1α), cytomegalovirus (CMV) immediate-early enhancer and/or promoter, chicken β-actin (CBA) and its derivative CAG, β glucuronidase (GUSB), or ubiquitin C (UBC), neuron-specific enolase (NSE), platelet-derived growth factor (PDGF), platelet-derived growth factor B-chain (PDGF-β), intercellular adhesion molecule 2 (ICAM-2), synapsin (Syn), methyl-CpG binding protein 2 (MeCP2), Ca2+/calmodulin-dependent protein kinase II (CaMKII), metabotropic glutamate receptor 2 (mGluR2), neurofilament light (NFL) or heavy (NFH), β-globin minigene nβ2, preproenkephalin (PPE), enkephalin (Enk) and excitatory amino acid transporter 2 (EAAT2), glial fibrillary acidic protein (GFAP), myelin basic protein (MBP), a cardiovascular promoter (e.g., αMHC, cTnT, and CMV-MLC2k), a liver promoter (e.g., hAAT, TBG), a skeletal muscle promoter (e.g., desmin, MCK, C512) or a fragment, e.g., a truncation, or a functional variant thereof.
[1117] 461. The isolated AAV particle of embodiment 460, wherein the promoter is an EF-1a promoter variant, e.g., a truncated EF-1a promoter.
[1118] 462. The isolated AAV particle of any one of embodiments 459-461, wherein the promoter comprises the nucleotide sequence of any one of SEQ ID NOs: 9000, 9001, 9003, 9004, 9008, 9009, 9011-9020, GCATG, CGTGAG, GT, GCTCCGGT, or GTAAG, a nucleotide sequence comprising at least one, two, or three but no more than four modifications, e.g., substitutions (e.g., conservative substitutions), insertions, or deletions, relative to the nucleotide sequence of SEQ ID NOs: 9000, 9001, 9003, 9004, 9008, 9009, 9011-9020, GCATG, CGTGAG, GT, GCTCCGGT, or GTAAG, or a nucleotide sequence with at least 80% (e.g., 85%, 90%, 95%, 96%, 97%, 98%, or 99%) sequence identity to any one of SEQ ID NOs: 9000, 9001, 9003, 9004, 9008, 9009, 9011-9020, GCATG, CGTGAG, GT, GCTCCGGT, or GTAAG.
[1119] 463. The isolated AAV particle of any one of embodiments 459-462, wherein the viral genome further comprises a polyA signal sequence.
[1120] 464. The isolated AAV particle of any one of embodiments 459-463, wherein the viral genome further comprises an inverted terminal repeat (ITR) sequence.
[1121] 465. The isolated AAV particle of any one of embodiments 459-464, wherein the viral genome comprises an ITR sequence positioned 5′ relative to the encoded antibody molecule.
[1122] 466. The isolated AAV particle of any one of embodiments 459-465, wherein the viral genome comprises an ITR sequence positioned 3′ relative to the encoded antibody molecule.
[1123] 467. The isolated AAV particle of any one of embodiments 459-466, wherein the viral genome comprises an ITR sequence positioned 5′ relative to the encoded antibody molecule and an ITR sequence positioned 3′ relative to the encoded antibody molecule.
[1124] 468. The isolated AAV particle of any one of embodiments 459-467, wherein the viral genome further comprises an enhancer, a Kozak sequence (e.g., GCCGCCACCATG (SEQ ID NO: 9021) or GAGGAGCCACC (SEQ ID NO: 9022), an intron region, and/or an exon region.
[1125] 469. The isolated AAV particle of any one of embodiments 459-468, wherein the viral genome comprises:
   [1126] (a) one or more inverted terminal repeat (ITR) sequences, optionally wherein the ITR sequence is positioned 5′ relative to the transgene encoding the antibody molecule and/or the ITR sequence is positioned 3′ relative to the transgene encoding the antibody molecule, optionally wherein the ITR comprises the nucleotide sequence of SEQ ID NO: 2026 and/or 2039,
   [1127] (b) an enhancer, optionally wherein the enhancer comprises the nucleotide sequence of SEQ ID NO: 2027,
   [1128] (d) an intron region, optionally wherein the intron region comprises the nucleotide sequence of SEQ ID NO: 2029,
   [1129] (e) a nucleotide sequence encoding one or more signal sequences, optionally wherein the signal sequence comprises the nucleotide sequence of SEQ ID NO: 2030 and/or 2035,
   [1130] (f) a nucleotide sequence encoding a heavy chain variable region (VH) of the antibody molecule, optionally wherein the VH is encoded by the nucleotide sequence of SEQ ID NO: 2031,
   [1131] (g) a nucleotide sequence encoding an IgG1 heavy chain constant region, optionally wherein the IgG1 heavy chain constant region is encoded by the nucleotide sequence of SEQ ID NO: 2032,
   [1132] (h) a furin cleavage site, optionally wherein the furin cleavage site comprises the nucleotide sequence of SEQ ID NO: 2033,
   [1133] (i) a linker, optionally wherein the linker is a T2A linker, optionally wherein the T2A linker comprises the nucleotide sequence of SEQ ID NO: 2034;
   [1134] (j) a nucleotide sequence encoding a light chain variable region (VL), optionally wherein the VL is encoded by the nucleotide sequence of SEQ ID NO: 2036;
   [1135] (k) a nucleotide sequence encoding a IgG kappa light chain constant region, optionally wherein the IgG kappa light chain constant region is encoded by the nucleotide sequence of SEQ ID NO: 2037; and/or
   [1136] (l) a polyadenylation (polyA) signal region, optionally wherein the T2A linker comprises the nucleotide sequence of SEQ ID NO: 2038.
[1137] 470. The isolated AAV particle of any one of embodiments 459-469, wherein the viral genome comprises in 5′ to 3′ order:
   [1138] (i) a 5′ adeno-associated (AAV) ITR, optionally wherein the 5′ AAV ITR comprises the nucleotide sequence of SEQ ID NO: 2026, or a nucleotide sequence at least 95% identical thereto;
   [1139] (ii) a CMVie enhancer, optionally wherein the CMVie enhancer comprises the nucleotide sequence of SEQ ID NO: 2027, or a nucleotide sequence at least 95% identical thereto;
   [1140] (iii) a CBA promoter or functional variant thereof, optionally wherein the CBA promoter or functional variant thereof comprises the nucleotide sequence of SEQ ID NO: 2028, or a nucleotide sequence at least 95% identical thereto;
   [1141] (iv) an intron, optionally wherein the intron comprises the nucleotide sequence of SEQ ID NO: 2029, or a nucleotide sequence at least 95% identical thereto;
   [1142] (v) a nucleotide sequence encoding a signal sequence, optionally wherein the nucleotide sequence encoding the signal sequence comprises the nucleotide sequence of SEQ ID NO: 2030, or a nucleotide sequence at least 95% identical thereto;
   [1143] (vi) a transgene encoding a heavy chain variable region (VH) of the antibody molecule, wherein the nucleotide sequence encoding the VH comprises the nucleotide sequence of SEQ ID NO: 2031 or a nucleotide sequence at least 80% (e.g., at least 85, 90, 95, 96, 97, 98, or 99%) identical thereto;
   [1144] (vii) a nucleotide sequence encoding an IgG1 heavy chain constant region, optionally wherein the nucleotide sequence encoding the IgG1 heavy chain constant region comprises the nucleotide sequence of SEQ ID NO: 2032, or a nucleotide sequence at least 80% (e.g., at least 85, 90, 95, 96, 97, 98, or 99%) identical thereto;
   [1145] (viii) a furin cleavage site, optionally wherein the furin cleavage site comprises the nucleotide sequence of SEQ ID NO: 2033, or a nucleotide sequence at least 95% identical thereto;
   [1146] (ix) a T2A linker, optionally wherein the T2A linker comprises the nucleotide sequence of SEQ ID NO: 2034, or a nucleotide sequence at least 95% identical thereto;
   [1147] (x) a nucleotide sequence encoding a signal sequence, optionally wherein the nucleotide sequence encoding the signal sequence comprises the nucleotide sequence of SEQ ID NO: 2035, or a nucleotide sequence at least 95% identical thereto;
   [1148] (xi) a transgene encoding a light chain variable region (VL) of the antibody molecule, wherein the nucleotide sequence encoding the VL comprises the nucleotide sequence of SEQ ID NO: 2036 or a nucleotide sequence at least 80% (e.g., at least 85, 90, 95, 96, 97, 98, or 99%) identical thereto;
   [1149] (xii) a nucleotide sequence encoding an IgG kappa light chain constant region, optionally wherein the nucleotide sequence encoding the IgG kappa light chain constant region comprises the nucleotide sequence of SEQ ID NO: 2037, or a nucleotide sequence at least 80% (e.g., at least 85, 90, 95, 96, 97, 98, or 99%) identical thereto;
   [1150] (xiii) a polyA signal region, optionally wherein the polyA signal region comprises the nucleotide sequence of SEQ ID NO: 2038, or a nucleotide sequence at least 95% identical thereto; and
   [1151] (xiv) a 3′ AAV ITR, optionally wherein the 3′ AAV ITR comprises the nucleotide sequence of SEQ ID NO: 2039, or a nucleotide sequence at least 95% identical thereto.
[1152] 471. The isolated AAV particle of any one of embodiments 459-470, wherein the viral genome comprises the nucleotide sequence of SEQ ID NO: 2025, or a nucleotide sequence at least 80% (e.g., at least 85, 90, 95, 96, 97, 98, or 99%) identical thereto.
[1153] 472. The isolated AAV particle of any one of embodiments 459-471, wherein the viral genome further comprises a nucleotide sequence encoding a miR binding site, e.g., a miR binding site that modulates, e.g., reduces, expression of the antibody molecule encoded by the viral genome in a cell or tissue where the corresponding miRNA is expressed.
[1154] 473. The isolated AAV particle of embodiment 472, wherein the encoded miRNA binding site is complementary, e.g., fully complementary or partially complementary, to a miRNA expressed in a cell or tissue of the DRG, liver, heart, hematopoietic, or a combination thereof.
[1155] 474. The isolated AAV particle of embodiment 472 or 473, wherein the encoded miR binding site modulates, e.g., reduces, expression of the encoded antibody molecule in a cell or tissue of the DRG, liver, heart, hematopoietic lineage, or a combination thereof.
[1156] 475. The isolated AAV particle of any one of embodiments 472-474, wherein the viral genome comprises at least 1-5 copies of the encoded miR binding site, e.g., at least 1, 2, 3, 4, or 5 copies.
[1157] 476. The isolated AAV particle of any one of embodiments 472-475, wherein the viral genome comprises at least 3 copies of an encoded miR binding sites, optionally wherein all three copies comprise the same miR binding site, or at least one, two, three, or all of the copies comprise a different miR binding site.
[1158] 477. The isolated AAV particle of embodiment 476, wherein the at least 3 copies of the encoded miR binding sites are continuous (e.g., not separated by a spacer), or are separated by a spacer, optionally wherein the spacer comprises the nucleotide sequence GATAGTTA, or a nucleotide sequence having at least one, two, or three modifications, e.g., substitutions (e.g., conservative substitutions), but no more than four modifications, e.g., substitutions (e.g., conservative substitutions), relative to the nucleotide sequence GATAGTTA.
[1159] 478. The isolated AAV particle of any one of embodiments 472-477, wherein the viral genome comprises at least 4 copies of an encoded miR binding site, optionally wherein all four copies comprise the same miR binding site, or at least one, two, three, or all of the copies comprise a different miR binding site.
[1160] 479. The isolated AAV particle of embodiment 478, wherein the at least 4 copies of the encoded miR binding sites are continuous (e.g., not separated by a spacer), or are separated by a spacer, optionally wherein the spacer comprises the nucleotide sequence GATAGTTA, or a nucleotide sequence having at least one, two, or three modifications, e.g., substitutions (e.g., conservative substitutions), but no more than four modifications, e.g., substitutions (e.g., conservative substitutions), relative to the nucleotide sequence GATAGTTA.
[1161] 480. The isolated AAV particle of any one of embodiments 472-479, wherein the encoded miR binding site comprises a miR122 binding site, a miR183 binding site, a miR-1 binding site, a miR-142-3p, or a combination thereof, optionally wherein:
   [1162] (i) the encoded miR122 binding site comprises the nucleotide sequence of SEQ ID NO: 3672, or a nucleotide sequence substantially identical (e.g., having at least 70%, 75%, 80%, 85%, 90%, 92%, 95%, 97%, 98%, or 99% sequence identity) thereto; or a nucleotide sequence having at least one, two, three, four, five, six, or seven modifications, e.g., substitutions (e.g., conservative substitutions), but no more than ten modifications, e.g., substitutions (e.g., conservative substitutions), relative to SEQ ID NO: 3672;
   [1163] (ii) the encoded miR183 binding site comprises the nucleotide sequence of SEQ ID NO: 3675, or a nucleotide sequence substantially identical (e.g., having at least 70%, 75%, 80%, 85%, 90%, 92%, 95%, 97%, 98%, or 99% sequence identity) thereto; or a nucleotide sequence having at least one, two, three, four, five, six, or seven modifications, e.g., substitutions (e.g., conservative substitutions), but no more than ten modifications, e.g., substitutions (e.g., conservative substitutions), relative to SEQ ID NO: 3675;
   [1164] (iii) the encoded miR-1 binding site comprises the nucleotide sequence of SEQ ID NO: 4679, or a nucleotide sequence substantially identical (e.g., having at least 70%, 75%, 80%, 85%, 90%, 92%, 95%, 97%, 98%, or 99% sequence identity) thereto; or a nucleotide sequence having at least one, two, three, four, five, six, or seven modifications, e.g., substitutions (e.g., conservative substitutions), but no more than ten modifications, e.g., substitutions (e.g., conservative substitutions), relative to SEQ ID NO: 4679; and/or
   [1165] (iv) the encoded miR-142-3p binding site comprises the nucleotide sequence of SEQ ID NO: 3674, or a nucleotide sequence substantially identical (e.g., having at least 70%, 75%, 80%, 85%, 90%, 92%, 95%, 97%, 98%, or 99% sequence identity) thereto; or a nucleotide sequence having at least one, two, three, four, five, six, or seven modifications, e.g., substitutions (e.g., conservative substitutions), but no more than ten modifications, e.g., substitutions (e.g., conservative substitutions), relative to SEQ ID NO: 3674.
[1166] 481. The isolated AAV particle of any one of embodiments 472-480, wherein the viral genome comprises an encoded miR122 binding site.
[1167] 482. The isolated AAV particle of any one of embodiments 472-481, wherein the viral genome comprises at least 1-5 copies, e.g., 1, 2, or 3 copies of a miR122 binding site, optionally wherein each copy is continuous (e.g., not separated by a spacer), or each copy is separated by a spacer, optionally wherein the spacer comprises the nucleotide sequence GATAGTTA, or a nucleotide sequence having at least one, two, or three modifications, e.g., substitutions (e.g., conservative substitutions), but no more than four modifications, e.g., substitutions (e.g., conservative substitutions), relative to the nucleotide sequence GATAGTTA.
[1168] 483. The isolated AAV particle of any one of embodiments 480-482, wherein the encoded miR122 binding site comprises the nucleotide sequence of SEQ ID NO: 3672, or a nucleotide sequence substantially identical (e.g., having at least 70%, 75%, 80%, 85%, 90%, 92%, 95%, 97%, 98%, or 99% sequence identity) thereto; or a nucleotide sequence having at least one, two, three, four, five, six, or seven modifications, e.g., substitutions (e.g., conservative substitutions), but no more than ten modifications, e.g., substitutions (e.g., conservative substitutions), relative to SEQ ID NO: 3672.
[1169] 484. The isolated AAV particle of any one of embodiments 472-483, wherein the viral genome comprises:
[1170] (A) (i) a first encoded miR122 binding site comprising the nucleotide sequence of SEQ ID NO: 3672, or a nucleotide sequence substantially identical (e.g., having at least 70%, 75%, 80%, 85%, 90%, 92%, 95%, 97%, 98%, or 99% sequence identity) thereto; or a nucleotide sequence having at least one, two, three, four, five, six, or seven modifications, e.g., substitutions (e.g., conservative substitutions), but no more than ten modifications, e.g., substitutions (e.g., conservative substitutions), relative to SEQ ID NO: 3672;
   [1171] (ii) a first spacer comprising the nucleotide sequence GATAGTTA, or a nucleotide sequence having at least one, two, or three modifications, e.g., substitutions (e.g., conservative substitutions), but no more than four modifications, e.g., substitutions (e.g., conservative substitutions), relative to the nucleotide sequence GATAGTTA; and
   [1172] (iii) a second encoded miR122 binding site comprising the nucleotide sequence of SEQ ID NO: 3672, or a nucleotide sequence substantially identical (e.g., having at least 70%, 75%, 80%, 85%, 90%, 92%, 95%, 97%, 98%, or 99% sequence identity) thereto; or a nucleotide sequence having at least one, two, three, four, five, six, or seven modifications, e.g., substitutions (e.g., conservative substitutions), but no more than ten modifications, e.g., substitutions (e.g., conservative substitutions), relative to SEQ ID NO: 3672; or
[1173] (B) (i) a first encoded miR122 binding site comprising the nucleotide sequence of SEQ ID NO: 3672, or a nucleotide sequence substantially identical (e.g., having at least 70%, 75%, 80%, 85%, 90%, 92%, 95%, 97%, 98%, or 99% sequence identity) thereto; or a nucleotide sequence having at least one, two, three, four, five, six, or seven modifications, e.g., substitutions (e.g., conservative substitutions), but no more than ten modifications, e.g., substitutions (e.g., conservative substitutions), relative to SEQ ID NO: 3672;
   [1174] (ii) a first spacer comprising the nucleotide sequence GATAGTTA, or a nucleotide sequence having at least one, two, or three modifications, e.g., substitutions (e.g., conservative substitutions), but no more than four modifications, e.g., substitutions (e.g., conservative substitutions), relative to the nucleotide sequence GATAGTTA;
   [1175] (iii) a second encoded miR122 binding site comprising the nucleotide sequence of SEQ ID NO: 3672, or a nucleotide sequence substantially identical (e.g., having at least 70%, 75%, 80%, 85%, 90%, 92%, 95%, 97%, 98%, or 99% sequence identity) thereto; or a nucleotide sequence having at least one, two, three, four, five, six, or seven modifications, e.g., substitutions (e.g., conservative substitutions), but no more than ten modifications, e.g., substitutions (e.g., conservative substitutions), relative to SEQ ID NO: 3672;
   [1176] (iv) a second spacer comprising the nucleotide sequence GATAGTTA, or a nucleotide sequence having at least one, two, or three modifications, e.g., substitutions (e.g., conservative substitutions), but no more than four modifications, e.g., substitutions (e.g., conservative substitutions), relative to the nucleotide sequence GATAGTTA; and
   [1177] (v) a third encoded miR122 binding site comprising the nucleotide sequence of SEQ ID NO: 3672, or a nucleotide sequence substantially identical (e.g., having at least 70%, 75%, 80%, 85%, 90%, 92%, 95%, 97%, 98%, or 99% sequence identity) thereto; or a nucleotide sequence having at least one, two, three, four, five, six, or seven modifications, e.g., substitutions (e.g., conservative substitutions), but no more than ten modifications, e.g., substitutions (e.g., conservative substitutions), relative to SEQ ID NO: 3672.
[1178] 485. The isolated AAV particle of any one of embodiments 472-484, wherein the viral genome comprises an encoded miR183 binding site.
[1179] 486. The isolated AAV particle of any one of embodiments 472-485, wherein the viral genome comprises at least 1-5 copies, e.g., 1, 2, or 3 copies of a miR183 binding site, optionally wherein each copy is continuous (e.g., not separated by a spacer), or each copy is separated by a spacer, optionally wherein the spacer comprises the nucleotide sequence GATAGTTA, or a nucleotide sequence having at least one, two, or three modifications, e.g., substitutions (e.g., conservative substitutions), but no more than four modifications, e.g., substitutions (e.g., conservative substitutions), relative to the nucleotide sequence GATAGTTA.
[1180] 487. The isolated AAV particle of embodiment 486, wherein the encoded miR183 binding site comprises the nucleotide sequence of SEQ ID NO: 3675, or a nucleotide sequence substantially identical (e.g., having at least 70%, 75%, 80%, 85%, 90%, 92%, 95%, 97%, 98%, or 99% sequence identity) thereto; or a nucleotide sequence having at least one, two, three, four, five, six, or seven modifications, e.g., substitutions (e.g., conservative substitutions), but no more than ten modifications, e.g., substitutions (e.g., conservative substitutions), relative to SEQ ID NO: 3675.
[1181] 488. The isolated AAV particle of any one of embodiments 472-487, wherein the viral genome comprises:
[1182] (A) (i) a first encoded miR183 binding site comprising the nucleotide sequence of SEQ ID NO: 3675, or a nucleotide sequence substantially identical (e.g., having at least 70%, 75%, 80%, 85%, 90%, 92%, 95%, 97%, 98%, or 99% sequence identity) thereto; or a nucleotide sequence having at least one, two, three, four, five, six, or seven modifications, e.g., substitutions (e.g., conservative substitutions), but no more than ten modifications, e.g., substitutions (e.g., conservative substitutions), relative to SEQ ID NO: 3675;
   [1183] (ii) a first spacer comprising the nucleotide sequence GATAGTTA, or a nucleotide sequence having at least one, two, or three modifications, e.g., substitutions (e.g., conservative substitutions), but no more than four modifications, e.g., substitutions (e.g., conservative substitutions), relative to the nucleotide sequence GATAGTTA; and
   [1184] (iii) a second encoded miR183 binding site comprising the nucleotide sequence of SEQ ID NO: 3675, or a nucleotide sequence substantially identical (e.g., having at least 70%, 75%, 80%, 85%, 90%, 92%, 95%, 97%, 98%, or 99% sequence identity) thereto; or a nucleotide sequence having at least one, two, three, four, five, six, or seven modifications, e.g., substitutions (e.g., conservative substitutions), but no more than ten modifications, e.g., substitutions (e.g., conservative substitutions), relative to SEQ ID NO: 3675; or
[1185] (B) (i) a first encoded miR183 binding site comprising the nucleotide sequence of SEQ ID NO: 3675, or a nucleotide sequence substantially identical (e.g., having at least 70%, 75%, 80%, 85%, 90%, 92%, 95%, 97%, 98%, or 99% sequence identity) thereto; or a nucleotide sequence having at least one, two, three, four, five, six, or seven modifications, e.g., substitutions (e.g., conservative substitutions), but no more than ten modifications, e.g., substitutions (e.g., conservative substitutions), relative to SEQ ID NO: 3675;
   [1186] (ii) a first spacer comprising the nucleotide sequence GATAGTTA, or a nucleotide sequence having at least one, two, or three modifications, e.g., substitutions (e.g., conservative substitutions), but no more than four modifications, e.g., substitutions (e.g., conservative substitutions), relative to the nucleotide sequence GATAGTTA;
   [1187] (iii) a second encoded miR183 binding site comprising the nucleotide sequence of SEQ ID NO: 3675, or a nucleotide sequence substantially identical (e.g., having at least 70%, 75%, 80%, 85%, 90%, 92%, 95%, 97%, 98%, or 99% sequence identity) thereto; or a nucleotide sequence having at least one, two, three, four, five, six, or seven modifications, e.g., substitutions (e.g., conservative substitutions), but no more than ten modifications, e.g., substitutions (e.g., conservative substitutions), relative to SEQ ID NO: 3675;
   [1188] (iv) a second spacer comprising the nucleotide sequence GATAGTTA, or a nucleotide sequence having at least one, two, or three modifications, e.g., substitutions (e.g., conservative substitutions), but no more than four modifications, e.g., substitutions (e.g., conservative substitutions), relative to the nucleotide sequence GATAGTTA; and
   [1189] (v) a third encoded miR183 binding site comprising the nucleotide sequence of SEQ ID NO: 3675, or a nucleotide sequence substantially identical (e.g., having at least 70%, 75%, 80%, 85%, 90%, 92%, 95%, 97%, 98%, or 99% sequence identity) thereto; or a nucleotide sequence having at least one, two, three, four, five, six, or seven modifications, e.g., substitutions (e.g., conservative substitutions), but no more than ten modifications, e.g., substitutions (e.g., conservative substitutions), relative to SEQ ID NO: 3675.
[1190] 489. The isolated AAV particle of any one of embodiments 472-488, wherein the viral genome comprises an encoded miR122 binding site and a miR-1 binding site.
[1191] 490. The isolated AAV particle of any one of embodiments 472-489, wherein the viral genome is single stranded or self-complementary.
[1192] 491. The isolated AAV particle of any one of embodiments 472-490, wherein the viral genome further comprises a nucleotide sequence encoding a Rep protein, e.g., a non-structural protein, wherein the Rep protein comprises a Rep78 protein, a Rep68, Rep52 protein, and/or a Rep40 protein.
[1193] 492. The isolated AAV particle of embodiment 491, wherein the Rep78 protein, the Rep68 protein, the Rep52 protein, and/or the Rep40 protein are encoded by at least one Rep gene.
[1194] 493. A cell, e.g., a host cell, comprising the AAV particle of any one of the preceding embodiments.
[1195] 494. The cell of embodiment 493, wherein the cell is a mammalian cell or an insect cell.
[1196] 495. The cell of embodiment 493 or 494, wherein the cell is a cell of a brain region or a spinal cord region, optionally a cell of the frontal cortex, sensory cortex, motor cortex, caudate, dentate nucleus, cerebellar cortex, cerebral cortex, brain stem, hippocampus, thalamus, putamen, cervical spinal cord region, thoracic spinal cord region, and/or lumbar spinal cord region.
[1197] 496. The cell of any one of embodiments 493-495, wherein the cell is a neuron, a sensory neuron, a motor neuron, an astrocyte, or a glial cell.
[1198] 497. A method of making the AAV particle of any one of embodiments 1-492, comprising
   [1199] (i) providing a host cell comprising a viral genome; and
   [1200] (ii) incubating the host cell under conditions suitable to enclose the viral genome in an AAV capsid variant, e.g., an AAV capsid variant described herein;
   [1201] thereby making the AAV particle.
[1202] 498. The method of embodiment 497, further comprising, prior to step (i), introducing a first nucleic acid molecule comprising the viral genome into the host cell.
[1203] 499. The method of embodiment 497 or 498, wherein the host cell comprises a second nucleic acid encoding the capsid variant.
[1204] 500. The method of embodiment 499, wherein the second nucleic acid molecule is introduced into the host cell prior to, concurrently with, or after the first nucleic acid molecule.
[1205] 501. A pharmaceutical composition comprising the AAV particle of any one of embodiments 1-492, and a pharmaceutically acceptable excipient.
[1206] 502. A method of delivering a payload to a cell or tissue (e.g., a CNS cell or a CNS tissue), comprising administering an effective amount of the pharmaceutical composition of embodiment 501, or the AAV particle of any one of embodiments 1-492.
[1207] 503. The method of embodiment 502, wherein the cell is a cell a cell of a brain region or a spinal cord region, optionally a cell of the frontal cortex, sensory cortex, motor cortex, caudate, dentate nucleus, cerebellar cortex, cerebral cortex, brain stem, hippocampus, thalamus, putamen, cervical spinal cord region, thoracic spinal cord region, and/or lumbar spinal cord region.
[1208] 504. The method of embodiment 502 or 503, wherein the cell is a neuron, a sensory neuron, a motor neuron, or an astrocyte.
[1209] 505. The method of any one of embodiments 502-504, wherein the cell or tissue is within a subject.
[1210] 506. The method of embodiment 505, wherein the subject has, has been diagnosed with having, or is at risk of having a neurological, e.g., a neurodegenerative disorder.
[1211] 507. The method of embodiment 505 or 506, wherein the subject has, has been diagnosed with having, or is at risk of having a disease associated with tau expression or activity.
[1212] 508. The method of any one of embodiments 505-507, wherein the subject has, has been diagnosed with having, or is at risk of having a tau-related disease (e.g., a tauopathy).
[1213] 509. The method of any one of embodiments 505-508, wherein the subject has, has been diagnosed with having, or is at risk of having Alzheimer's disease (AD), frontotemporal dementia and parkinsonism linked to chromosome 17 (FTDP-17), frontotemporal lobar degeneration (FTLD), frontotemporal dementia (FTD), chronic traumatic encephalopathy (CTE), progressive Supranuclear Palsy (PSP), Down's syndrome, Pick's disease, corticobasal degeneration (CBD), corticobasal syndrome, amyotrophic lateral sclerosis (ALS), prion diseases, Creutzfeldt-Jakob disease (CJD), multiple system atrophy, tangle-only dementia, or progressive subcortical gliosis.
[1214] 510. A method of treating a subject having or diagnosed with having a neurological disorder, e.g., a neurodegenerative disorder, comprising administering to the subject an effective amount of the pharmaceutical composition of embodiment 501, or the AAV particle of any one of embodiments 1-492.
[1215] 511. A method of treating a subject having or diagnosed with having a disease related to expression of tau expression, comprising administering to the subject an effective amount of the pharmaceutical composition of embodiment 501, or the AAV particle of any one of embodiments 1-492.
[1216] 512. A method of treating a subject having or diagnosed with a tauopathy, comprising administering to the subject an effective amount of the pharmaceutical composition of embodiment 501, or the AAV particle of any one of embodiments 1-492.
[1217] 513. The method of any one of embodiments 506-512, wherein the neurological disorder, neurodegenerative disorder, disease associated with tau, or tauopathy is Alzheimer's Disease, frontotemporal dementia and parkinsonism linked to chromosome 17 (FTDP-17), frontotemporal lobar degeneration (FTLD), frontotemporal dementia (FTD), chronic traumatic encephalopathy (CTE), progressive Supranuclear Palsy (PSP), Down's syndrome, Pick's disease, corticobasal degeneration (CBD), corticobasal syndrome, amyotrophic lateral sclerosis (ALS), prion diseases, Creutzfeldt-Jakob disease (CJD), multiple system atrophy, tangle-only dementia, or progressive subcortical gliosis.
[1218] 514. The method of any one of embodiments 510-513, where treating comprises prevention of progression of the disease or disorder in the subject.
[1219] 515. The method of any one of embodiments 505-514, wherein the subject is a human.
[1220] 516. The method of any one of embodiments 505-515, wherein the AAV particle is administered to the subject intravenously, via intra-cisterna magna injection (ICM), intracerebrally, intrathecally, intracerebroventricularly, via intraparenchymal administration, or intramuscularly.
[1221] 517. The method of any one of embodiments 505-516, wherein the AAV particle is administered to the subject via focused ultrasound (FUS), e.g., coupled with the intravenous administration of microbubbles (FUS-MB), or MRI-guided FUS coupled with intravenous administration.
[1222] 518. The method of any one of embodiments 505-517, wherein the AAV particle is administered to the subject intravenously.
[1223] 519. The method of any one of embodiments 502-518, wherein administration of the AAV particle results in a decreased presence, level, and/or activity of tau mRNA, tau protein, or combination thereof.
[1224] 520. The method of any one of embodiments 502-519, wherein administration of the AAV particle results in an increased presence, level, and/or activity of tau mRNA, tau protein, or a combination thereof.
[1225] 521. The pharmaceutical composition of embodiment 501, or the AAV particle of any one of embodiments 1-492, for use in a method of delivering a payload to a cell or tissue.
[1226] 522. The pharmaceutical composition of embodiment 501, or the AAV particle of any one of embodiments 1-492, for use in a method of treating a neurological disorder, a neurodegenerative disorder, a disease associated with tau expression or activity, or a tauopathy.
[1227] 523. The pharmaceutical composition of embodiment 501, or the AAV particle of any one of embodiments 1-492, for use in the manufacture of a medicament.
[1228] 524. Use of the pharmaceutical composition of embodiment 501, or the AAV particle of any one of embodiments 1-492, in the manufacture of a medicament.
[1229] 525. Use of the pharmaceutical composition of embodiment 501, or the AAV particle of any one of embodiments 1-492, in the manufacture of a medicament for treating a neurological disorder, a neurodegenerative disorder, a disease associated with tau expression or activity, or a tauopathy.

### BRIEF DESCRIPTION OF THE DRAWINGS

[1230] FIG. 1A is a graph showing the percentage of transduced cells (% HA positive cells) in various brain regions of NHPs following intravenous administration of a dose of 6.7e12 VG/kg of AAV particles comprising the TTD-001 capsid variant. FIG. 1B is a graph showing the percentage of transduced cells (% HA positive cells) in various brain regions of NHPs following intravenous administration of a dose of 2e13 VG/kg of AAV particles comprising the TTD-001 capsid variant. FIG. 1C is a graph showing the percentage of neuronal transduction (% HA cells among SMI311+cells) in the thalamus, dentate nucleus, and spinal cord of the NHPs following intravenous administration of a dose of 2e13 VG/kg of AAV particles comprising the TTD-001 capsid variant.

### DETAILED DESCRIPTION

### Overview

[1231] Described herein, inter alia, are compositions comprising isolated, e.g., recombinant, viral particles, e.g., AAV particles, for delivering functional anti-tau antibodies, and methods of making and using the same. Adeno-associated viruses (AAV) are small non-enveloped icosahedral capsid viruses of the Parvoviridae family characterized by a single stranded DNA viral genome. Parvoviridae family viruses consist of two subfamilies: Parvovirinae, which infect vertebrates, and Densovirinae, which infect invertebrates. The Parvoviridae family includes the Dependovirus genus which includes AAV, capable of replication in vertebrate hosts including, but not limited to, human, primate, bovine, canine, equine, and ovine species.

[1232] The parvoviruses and other members of the Parvoviridae family are generally described in Kenneth I. Berns, “Parvoviridae: The Viruses and Their Replication,” Chapter 69 in Fields Virology (3d Ed. 1996), the contents of which are incorporated by reference in their entirety.

[1233] AAV have proven to be useful as a biological tool due to their relatively simple structure, their ability to infect a wide range of cells (including quiescent and dividing cells) without integration into the host genome and without replicating, and their relatively benign immunogenic profile. The genome of the virus may be manipulated to contain a minimum of components for the assembly of a functional recombinant virus, or viral particle, which is loaded with or engineered to target a particular tissue and express or deliver a desired payload. The genome of the virus may be modified to contain a minimum of components for the assembly of a functional recombinant virus, or viral particle, which is loaded with or engineered to express or deliver a desired nucleic acid construct or payload, e.g., a transgene, polypeptide-encoding polynucleotide, e.g., an anti-tau antibody molecule, which may be delivered to a target cell, tissue, or organism. In some embodiments, the target cell is a CNS cell. In some embodiments, the target tissue is a CNS tissue. The target CNS tissue may be brain tissue. In some embodiments, the brain target comprises caudate, putamen, thalamus, superior colliculus, cortex, and corpus collosum.

[1234] Gene therapy presents an alternative approach tauopathies and related disorders. AAVs are commonly used in gene therapy approaches as a result of a number of advantageous features. Without wishing to be bound by theory, it is believed in some embodiments, that expression vectors, e.g., an adeno-associated viral vector (AAVs) or AAV particle, e.g., an AAV particle described herein, can be used to administer and/or deliver an anti-tau antibody molecule in order to achieve sustained, high concentrations, allowing for longer lasting efficacy, fewer dose treatments, broad biodistribution, and/or more consistent levels of the antibody, relative to a non-AAV therapy.

[1235] As demonstrated in the Examples herein below, certain AAV capsid variants described herein show multiple advantages over wild-type AAV9, including (i) increased penetrance through the blood brain barrier following intravenous administration, (ii) wider distribution throughout the multiple brain regions, e.g., frontal cortex, sensory cortex, motor cortex, putamen, thalamus, cerebellar cortex, dentate nucleus, caudate, and/or hippocampus, and/or (iii) elevated payload expression in multiple brain regions. Without wishing to be being bound by theory, it is believed that these advantages may be due, in part, to the dissemination of the AAV capsid variants through the brain vasculature. In some embodiments, the AAV capsids described herein enhance the delivery of a payload, e.g., an anti-tau antibody molecule described herein, to multiple regions of the brain including for example, the frontal cortex, sensory cortex, motor cortex, putamen, thalamus, cerebellar cortex, dentate nucleus, caudate, and/or hippocampus. In some embodiments, enhance the expression of a payload, e.g., an anti-tau antibody described herein, to multiple cell types in the CNS, e.g., neurons, oligodendrocytes, and/or glial cells. Without wishing to be bound by theory, an AAV particle comprising an AAV capsid polypeptide, e.g., an AAV capsid variant described herein, for the vectorized delivery of an anti-tau antibody described here will result in increased penetrance through the blood brain barrier, e.g., following intravenous administration, and/or increased biodistribution of the anti-tau antibody in the central nervous system, e.g., the brain and the spinal cord.

### I. Compositions

[1236] According to the present disclosure, compositions for delivering functional anti-tau antibody molecules by adeno-associated virus particles (AAVs) are provided. In some embodiments, an AAV particle, e.g., an AAV particle as described herein, or plurality of particles, may be provided, e.g., delivered, via any of several routes of administration, to a cell, tissue, organ, or organism, in vivo, ex vivo, or in vitro.

[1237] In some embodiments, AAV particles, nucleic acids, e.g., nucleic acid molecules encoding an antibody molecule, and/or payloads, e.g., an antibody molecule, and methods of using and making the same are described in WO2017189963, the contents of which are herein incorporated by reference in their entirety.

[1238] In some embodiments, the nucleic acid sequences, genetic elements, AAV vectors, and polypeptides disclosed herein may be engineered to contain modular elements and/or sequence motifs assembled to enable expression of an antibody molecule, e.g., an antibody molecule described herein. In some embodiments, the genetic element comprises a nucleotide sequence encoding a transgene encoding an antibody molecule (e.g., an antibody molecule described herein). In some embodiments, the nucleic acid sequence encodes an antibody molecule comprising one or more of the CDRs (e.g., heavy chain and/or light chain CDRs) of an antibody molecule, a variable heavy (VH) chain region and/or variable light (VL) chain region, a heavy and/or light chain constant region, a heavy and/or light chain, or a combination thereof. In some embodiments, the nucleic acid sequence encoding the antibody molecule may also encode a linker, e.g., such that the VH/heavy chain and the VL/light chain of the encoded antibody molecule are connected via a linker. In some embodiments, the order of expression, structural position, or concatemer count (e.g., the VH, VL, heavy chain, light chain, and/or linker) may be different within or among genetic element sequences. In some embodiments, the identity, position, and number of linkers expressed by a genetic element described herein may vary. In some embodiments, the genetic element may further comprise an internal repeat (ITR) sequence, promoter region, an intron region, an exon region, a Kozak sequence, an enhancer, a polyadenylation sequence, or combination thereof.

[1239] In some embodiments, the present disclosure provides methods for delivering an antibody molecule (e.g., an anti-tau antibody described herein) and/or a nucleic acid sequence encoding an antibody molecule (e.g., an anti-tau antibody described herein) comprised within the genetic element comprised within a recombinant, AAV particle (e.g., an AAV particle described herein) to a cell, tissue, organ, or subject.

### Adeno-Associated Viral (AAV) Particles

[1240] AAV have a genome of about 5,000 nucleotides in length which contains two open reading frames encoding the proteins responsible for replication (Rep) and the structural protein of the capsid (Cap). The open reading frames are flanked by two Inverted Terminal Repeat (ITR) sequences, which serve as the origin of replication of the viral genome. The wild-type AAV viral genome comprises nucleotide sequences for two open reading frames, one for the four non-structural Rep proteins (Rep78, Rep68, Rep52, Rep40, encoded by Rep genes) and one for the three capsid, or structural, proteins (VP1, VP2, VP3, encoded by capsid genes or Cap genes). The Rep proteins are important for replication and packaging, while the capsid proteins are assembled to create the protein shell of the AAV, or AAV capsid. Alternative splicing and alternate initiation codons and promoters result in the generation of four different Rep proteins from a single open reading frame and the generation of three capsid proteins from a single open reading frame. Though it varies by AAV serotype, as a non-limiting example, for AAV9/hu.14 (SEQ ID NO: 123 of U.S. Pat. No. 7,906,111, the contents of which are herein incorporated by reference in their entirety) VP1 refers to amino acids 1-736, VP2 refers to amino acids 138-736, and VP3 refers to amino acids 203-736. As another non-limiting example, VP1 refers to amino acids 1-743 numbered according to SEQ ID NO: 1, VP2 refers to amino acids 138-743 numbered according to SEQ ID NO: 1, and VP3 refers to amino acids 203-743 numbered according to SEQ ID NO: 1. In other words, VP1 is the full-length capsid sequence, while VP2 and VP3 are shorter components of the whole. As a result, changes in the sequence in the VP3 region, are also changes to VP1 and VP2, however, the percent difference as compared to the parent sequence will be greatest for VP3 since it is the shortest sequence of the three. Though described here in relation to the amino acid sequence, the nucleic acid sequence encoding these proteins can be similarly described. Together, the three capsid proteins assemble to create the AAV capsid protein. While not wishing to be bound by theory, the AAV capsid protein typically comprises a molar ratio of 1:1:10 of VP1:VP2:VP3. As used herein, an “AAV serotype” is defined primarily by the AAV capsid. In some instances, the ITRs are also specifically described by the AAV serotype (e.g., AAV2/9).

[1241] The AAV particle typically requires a co-helper (e.g., adenovirus) to undergo productive infection in cells. In the absence of such helper functions, the AAV virions essentially enter host cells but do not integrate into the cells' genome.

[1242] AAV particles have been investigated for delivery of gene therapeutics because of several unique features. Non-limiting examples of the features include (i) the ability to infect both dividing and non-dividing cells; (ii) a broad host range for infectivity, including human cells; (iii) wild-type AAV has not been associated with any disease and has not been shown to replicate in infected cells; (iv) the lack of cell-mediated immune response against the vector, and (v) the non-integrative nature in a host chromosome thereby reducing potential for long-term genetic alterations. Moreover, infection with AAV vectors has minimal influence on changing the pattern of cellular gene expression (Stilwell and Samulski et al., Biotechniques, 2003, 34, 148, the contents of which are herein incorporated by reference in their entirety).

[1243] Typically, AAV particles for anti-tau antibody molecule delivery may comprise recombinant viral genomes which are replication defective as they lack sequences encoding functional Rep and Cap proteins within the viral genome. In some cases, the defective AAV genomes may lack most or all coding sequences and essentially only contain one or two AAV ITR sequences and a payload sequence. In certain embodiments, the viral genome encodes an anti-tau antibody molecule.

[1244] In some embodiments, the AAV particles of the present disclosure may be introduced into mammalian cells.

[1245] AAV particles may be modified to enhance the efficiency of delivery. Such modified AAV particles of the present disclosure can be packaged efficiently and can be used to successfully infect the target cells at high frequency and with minimal toxicity.

[1246] In other embodiments, AAV particles of the present disclosure may be used to deliver an anti-tau antibody molecule to the central nervous system (see, e.g., U.S. Pat. No. 6,180,613; the contents of which are herein incorporated by reference in their entirety) or to specific tissues of the CNS.

[1247] It is understood that the compositions described herein may have additional conservative or non-essential amino acid substitutions, which do not have a substantial effect on their functions.

### AAV Capsids and Variants Thereof

[1248] In some embodiments, an AAV particle, e.g., an AAV particle for the vectorized delivery of protein described herein (e.g., an anti-tau antibody molecule), may comprise an AAV capsid polypeptide, e.g., an AAV capsid variant.

[1249] In some embodiments, the AAV capsid polypeptide, e.g., AAV capsid variant, allows for blood brain barrier penetration following intravenous administration. In some embodiments, the AAV capsid, e.g., AAV capsid variant, allows for blood brain barrier penetration following focused ultrasound (FUS), e.g., coupled with the intravenous administration of microbubbles (FUS-MB), or MRI-guided FUS coupled with intravenous administration. In some embodiments the AAV capsid, e.g., AAV capsid variant allows for increased distribution to a brain region. In some embodiments, the brain region comprises a frontal cortex, sensory cortex, motor cortex, caudate, dentate nucleus, cerebellar cortex, cerebral cortex, brain stem, hippocampus, thalamus, putamen, or a combination thereof. In some embodiments, the AAV capsid, e.g., AAV capsid variant allows for preferential transduction in a brain region relative to the transduction in the dorsal root ganglia (DRG).

[1250] In some embodiments the AAV capsid polypeptide, e.g., AAV capsid variant allows for increased distribution to a spinal cord region. In some embodiments, the spinal region comprises a cervical spinal cord region, thoracic spinal cord region, and/or lumbar spinal cord region.

[1251] In some embodiments, the AAV capsid polypeptide, e.g., an AAV capsid variant comprises a VOY101 capsid polypeptide, an AAVPHP.B (PHP.B) capsid polypeptide, a AAVPHP.N (PHP.N) capsid polypeptide, an AAV1 capsid polypeptide, an AAV2 capsid polypeptide, an AAVS capsid polypeptide, an AAV9 capsid polypeptide, an AAV9 K449R capsid polypeptide, an AAVrh10 capsid polypeptide, or a functional variant thereof. In some embodiments, the AAV capsid polypeptide, e.g., AAV capsid variant, comprises an amino acid sequence of any of the AAV capsid polypeptides in Table 1, or an amino acid sequence substantially identical (e.g., having at least 70%, 75%, 80%, 85%, 90%, 92%, 95%, 97%, 98%, or 99% sequence identity) thereto. In some embodiments, the nucleotide sequence encoding the AAV capsid polypeptide comprises any one of the nucleotide sequences in Table 1, or a nucleotide sequence substantially identical (e.g., having at least 70%, 75%, 80%, 85%, 90%, 92%, 95%, 97%, 98%, or 99% sequence identity) thereto.

[1252] In some embodiments, the AAV capsid variant, described herein does not comprise an amino acid sequence present immediately subsequent to position 586, 588, or 589 numbered relative to SEQ ID NO: 138, having at least 5 consecutive amino acids corresponding to positions 586 to 599, e.g., 586 to 594, 587 to 595, 588 to 596, 589 to 597, 590 to 598, numbered relative to the amino acid sequences in Table 1 of WO2020223276, the contents of which are hereby incorporated by reference in their entirety.

[1253] In any of the embodiments described herein, a position comprising 5 consecutive amino acids corresponding to positions 586 to 599, e.g., 586 to 594, 587 to 595, 588 to 596, 589 to 597, 590 to 598 numbered relative to SEQ ID NO: 138 can be identified by providing an alignment of a reference sequence and a query sequence, wherein the reference sequence is SEQ ID NO: 138, and identifying the residues corresponding to the positions in the query sequence that correspond to positions 586 to 599, e.g., 586 to 594, 587 to 595, 588 to 596, 589 to 597, 590 to 598 in the reference sequence.

[1254] In some embodiments, the AAV capsid polypeptide, e.g., AAV capsid variant, described herein does not comprise an amino acid sequence present immediately subsequent to position 586, 588, or 589 numbered relative to SEQ ID NO: 138, at least 5 consecutive amino acids corresponding to positions 586 to 599, e.g., 586 to 594, 587 to 595, 588 to 596, 589 to 597, 590 to 598, numbered relative to SEQ ID NO: 138. In some embodiments, the AAV capsid polypeptide, e.g., AAV capsid variant, described herein, does not comprise an amino acid sequence present immediately subsequent to position 586, 588, or 589 numbered relative to SEQ ID NO: 138, having at least 5 consecutive amino acids corresponding to positions 586 to 599, e.g., 586 to 594, 587 to 595, 588 to 596, 589 to 597, 590 to 598, numbered relative to SEQ ID NO: 12. In some embodiments, the AAV capsid polypeptide, e.g., AAV capsid variant, described herein, does not comprise an amino acid sequence present immediately subsequent to position 586, 588, or 589 numbered relative to SEQ ID NO: 138, having at least than 5 consecutive amino acids corresponding to positions 586 to 599, e.g., 586 to 594, 587 to 595, 588 to 596, 589 to 597, 590 to 598, numbered relative to SEQ ID NO: 13. In some embodiments, the AAV capsid polypeptide, e.g., AAV capsid variant, or the parent AAV capsid may be, at a position other than 5 consecutive amino acids corresponding to positions 586 to 599, e.g., 586 to 594, 587 to 595, 588 to 596, 589 to 597, 590 to 598, numbered relative to SEQ ID NO: 1.

TABLE 1
Exemplary full length capsid sequences

| | SEQ | |
|---|---|---|
| | ID | |
| Description | NO: | Sequence Information |
| VOY101 | 1 | MAADGYLPDWLEDNLSEGIREWWALKPGAPQPKANQQHQDNARGLVLPGYKYLG |
| | | PGNGLDKGEPVNAADAAALEHDKAYDQQLKAGDNPYLKYNHADAEFQERLKEDT |
| | | SFGGNLGRAVFQAKKRLLEPLGLVEEAAKTAPGKKRPVEQSPQEPDSSAGIGKS |
| | | GAQPAKKRLNFGQTGDTESVPDPQPIGEPPAAPSGVGSLTMASGGGAPVADNNE |
| | | GADGVGSSSGNWHCDSQWLGDRVITTSTRIWALPTYNNHLYKQISNSTSGGSSN |
| | | DNAYFGYSTPWGYFDFNRFHCHFSPRDWQRLINNNWGFRPKRLNFKLFNIQVKE |
| | | VTDNNGVKTIANNLTSTVQVFTDSDYQLPYVLGSAHEGCLPPFPADVFMIPQYG |
| | | YLTLNDGSQAVGRSSFYCLEYFPSQMLRTGNNFQFSYEFENVPFHSSYAHSQSL |
| | | DRLMNPLIDQYLYYLSKIINGSGQNQQTLKFSVAGPSNMAVQGRNYIPGPSYRQ |
| | | QRVSTTVTQNNNSEFAWPGASSWALNGRNSLMNPGPAMASHKEGEDRFFPLSGS |
| | | LIFGKQGTGRDNVDADKVMITNEEEIKTTNPVATESYGQVATNHQSDGTLAVPF |
| | | KAQAQTGWVQNQGILPGMVWQDRDVYLQGPIWAKIPHTDGNFHPSPLMGGFGMK |
| | | HPPPQILIKNTPVPADPPTAFNKDKLNSFITQYSTGQVSVEIEWELQKENSKRW |
| | | NPEIQYTSNYYKSNNVEFAVNTEGVYSEPRPIGTRYLTRNL |
| AAV9/hu.1 | 11 | MAADGYLPDWLEDNLSEGIREWWALKPGAPQPKANQQHQDNARGLVLPGYKYLG |
| 4 K449R | | PGNGLDKGEPVNAADAAALEHDKAYDQQLKAGDNPYLKYNHADAEFQERLKEDT |
| | | SFGGNLGRAVFQAKKRLLEPLGLVEEAAKTAPGKKRPVEQSPQEPDSSAGIGKS |
| | | GAQPAKKRLNFGQTGDTESVPDPQPIGEPPAAPSGVGSLTMASGGGAPVADNNE |
| | | GADGVGSSSGNWHCDSQWLGDRVITTSTRIWALPTYNNHLYKQISNSTSGGSSN |
| | | DNAYFGYSTPWGYFDFNRFHCHFSPRDWQRLINNNWGFRPKRLNFKLFNIQVKE |
| | | VTDNNGVKTIANNLTSTVQVFTDSDYQLPYVLGSAHEGCLPPFPADVEMIPQYG |
| | | YLTLNDGSQAVGRSSFYCLEYFPSQMLRTGNNFQFSYEFENVPFHSSYAHSQSL |
| | | DRLMNPLIDQYLYYLSRTINGSGQNQQTLKFSVAGPSNMAVQGRNYIPGPSYRQ |
| | | QRVSTTVTQNNNSEFAWPGASSWALNGRNSLMNPGPAMASHKEGEDRFFPLSGS |
| | | LIFGKQGTGRDNVDADKVMITNEEEIKTTNPVATESYGQVATNHQSAQAQAQTG |
| | | WVQNQGILPGMVWQDRDVYLQGPIWAKIPHTDGNFHPSPLMGGFGMKHPPPQIL |
| | | IKNTPVPADPPTAFNKDKLNSFITQYSTGQVSVEIEWELQKENSKRWNPEIQYT |
| | | SNYYKSNNVEFAVNTEGVYSEPRPIGTRYLTRNL |
| AAV9/hu.1 | 138 | MAADGYLPDWLEDNLSEGIREWWALKPGAPQPKANQQHQDNARGLVLPGYKYLG |
| 4 WT | | PGNGLDKGEPVNAADAAALEHDKAYDQQLKAGDNPYLKYNHADAEFQERLKEDT |
| (amino | | SFGGNLGRAVFQAKKRLLEPLGLVEEAAKTAPGKKRPVEQSPQEPDSSAGIGKS |
| acid) | | GAQPAKKRLNFGQTGDTESVPDPQPIGEPPAAPSGVGSLIMASGGGAPVADNNE |
| | | GADGVGSSSGNWHCDSQWLGDRVITTSTRTWALPTYNNHLYKQISNSTSGGSSN |
| | | DNAYFGYSTPWGYFDFNRFHCHFSPRDWQRLINNNWGFRPKRLNFKLFNIQVKE |
| | | VTDNNGVKTIANNLTSTVQVFTDSDYQLPYVLGSAHEGCLPPFPADVFMIPQYG |
| | | YLTLNDGSQAVGRSSFYCLEYFPSQMLRTGNNFQFSYEFENVPFHSSYAHSQSL |
| | | DRLMNPLIDQYLYYLSKTINGSGQNQQTLKFSVAGPSNMAVQGRNYIPGPSYRQ |
| | | QRVSTTVTQNNNSEFAWPGASSWALNGRNSLMNPGPAMASHKEGEDRFFPLSGS |
| | | LIFGKQGTGRDNVDADKVMITNEEEIKTINPVATESYGQVATNHQSAQAQAQTG |
| | | WVQNQGILPGMVWQDRDVYLQGPIWAKIPHTDGNFHPSPLMGGFGMKHPPPQIL |
| | | IKNTPVPADPPTAFNKDKLNSFITQYSTGQVSVEIEWELQKENSKRWNPEIQYT |
| | | SNYYKSNNVEFAVNTEGVYSEPRPIGTRYLTRNL |
| | | ATGGCTGCCGATGGTTATCTTCCAGATTGGCTCGAGGACAACCTTAGTGAAGGA |
| AAV9/hu.1 | 137 | ATTCGCGAGTGGTGGGCTTTGAAACCTGGAGCCCCTCAACCCAAGGCAAATCAA |
| 4 WT | | CAACATCAAGACAACGCTCGAGGTCTTGTGCTTCCGGGTTACAAATACCTTGGA |
| (DNA) | | CCCGGCAACGGACTCGACAAGGGGGAGCCGGTCAACGCAGCAGACGCGGCGGCC |
| | | CTCGAGCACGACAAGGCCTACGACCAGCAGCTCAAGGCCGGAGACAACCCGTAC |
| | | CTCAAGTACAACCACGCCGACGCCGAGTTCCAGGAGCGGCTCAAAGAAGATACG |
| | | TCTTTTGGGGGCAACCTCGGGCGAGCAGTCTTCCAGGCCAAAAAGAGGCTTCTT |
| | | GAACCTCTTGGTCTGGTTGAGGAAGCGGCTAAGACGGCTCCTGGAAAGAAGAGG |
| | | CCTGTAGAGCAGTCTCCTCAGGAACCGGACTCCTCCGCGGGTATTGGCAAATCG |
| | | GGTGCACAGCCCGCTAAAAAGAGACTCAATTTCGGTCAGACTGGCGACACAGAG |
| | | TCAGTCCCAGACCCTCAACCAATCGGAGAACCTCCCGCAGCCCCCTCAGGTGTG |
| | | GGATCTCTTACAATGGCTTCAGGTGGTGGCGCACCAGTGGCAGACAATAACGAA |
| | | GGTGCCGATGGAGTGGGTAGTTCCTCGGGAAATTGGCATTGCGATTCCCAATGG |
| | | CTGGGGGACAGAGTCATCACCACCAGCACCCGAACCTGGGCCCTGCCCACCTAC |
| | | AACAATCACCTCTACAAGCAAATCTCCAACAGCACATCTGGAGGATCTTCAAAT |
| | | GACAACGCCTACTTCGGCTACAGCACCCCCTGGGGGTATTTTGACTTCAACAGA |
| | | TTCCACTGCCACTTCTCACCACGTGACTGGCAGCGACTCATCAACAACAACTGG |
| | | GGATTCCGGCCTAAGCGACTCAACTTCAAGCTCTTCAACATTCAGGTCAAAGAG |
| | | GTTACGGACAACAATGGAGTCAAGACCATCGCCAATAACCTTACCAGCACGGTC |
| | | CAGGTCTTCACGGACTCAGACTATCAGCTCCCGTACGTGCTCGGGTCGGCTCAC |
| | | GAGGGCTGCCTCCCGCCGTTCCCAGCGGACGTTTTCATGATTCCTCAGTACGGG |
| | | TATCTGACGCTTAATGATGGAAGCCAGGCCGTGGGTCGTTCGTCCTTTTACTGC |
| | | CTGGAATATTTCCCGTCGCAAATGCTAAGAACGGGTAACAACTTCCAGTTCAGC |
| | | TACGAGTTTGAGAACGTACCTTTCCATAGCAGCTACGCTCACAGCCAAAGCCTG |
| | | GACCGACTAATGAATCCACTCATCGACCAATACTTGTACTATCTCTCAAAGACT |
| | | ATTAACGGTTCTGGACAGAATCAACAAACGCTAAAATTCAGTGTGGCCGGACCC |
| | | AGCAACATGGCTGTCCAGGGAAGAAACTACATACCTGGACCCAGCTACCGACAA |
| | | CAACGTGTCTCAACCACTGTGACTCAAAACAACAACAGCGAATTTGCTTGGCCT |
| | | GGAGCTTCTTCTTGGGCTCTCAATGGACGTAATAGCTTGATGAATCCTGGACCT |
| | | GCTATGGCCAGCCACAAAGAAGGAGAGGACCGTTTCTTTCCTTTGTCTGGATCT |
| | | TTAATTTTTGGCAAACAAGGAACTGGAAGAGACAACGTGGATGCGGACAAAGTC |
| | | ATGATAACCAACGAAGAAGAAATTAAAACTACTAACCCGGTAGCAACGGAGTCC |
| | | TATGGACAAGTGGCCACAAACCACCAGAGTGCCCAAGCACAGGCGCAGACCGGC |
| | | TGGGTTCAAAACCAAGGAATACTTCCGGGTATGGTTTGGCAGGACAGAGATGTG |
| | | TACCTGCAAGGACCCATTTGGGCCAAAATTCCTCACACGGACGGCAACTTTCAC |
| | | CCTTCTCCGCTGATGGGAGGGTTTGGAATGAAGCACCCGCCTCCTCAGATCCTC |
| | | ATCAAAAACACACCTGTACCTGCGGATCCTCCAACGGCCTTCAACAAGGACAAG |
| | | CTGAACTCTTTCATCACCCAGTATTCTACTGGCCAAGTCAGCGTGGAGATCGAG |
| | | TGGGAGCTGCAGAAGGAAAACAGCAAGCGCTGGAACCCGGAGATCCAGTACACT |
| | | TCCAACTATTACAAGTCTAATAATGTTGAATTTGCTGTTAATACTGAAGGTGTA |
| | | TATAGTGAACCCCGCCCCATTGGCACCAGATACCTGACTCGTAATCTGTAA |
| PHP.B | 12 | MAADGYLPDWLEDNLSEGIREWWALKPGAPQPKANQQHQDNARGLVLPGYKYLG |
| (amino | | PGNGLDKGEPVNAADAAALEHDKAYDQQLKAGDNPYLKYNHADAEFQERLKEDT |
| acid) | | SFGGNLGRAVFQAKKRLLEPLGLVEEAAKTAPGKKRPVEQSPQEPDSSAGIGKS |
| | | GAQPAKKRLNFGQTGDTESVPDPQPIGEPPAAPSGVGSLTMASGGGAPVADNNE |
| | | GADGVGSSSGNWHCDSQWLGDRVITTSTRTWALPTYNNHLYKQISNSTSGGSSN |
| | | DNAYFGYSTPWGYFDFNRFHCHFSPRDWQRLINNNWGFRPKRLNFKLFNIQVKE |
| | | VTDNNGVKTIANNLTSTVQVFTDSDYQLPYVLGSAHEGCLPPFPADVFMIPQYG |
| | | YLTLNDGSQAVGRSSFYCLEYFPSQMLRTGNNFQFSYEFENVPFHSSYAHSQSL |
| | | DRLMNPLIDQYLYYLSRTINGSGQNQQTLKFSVAGPSNMAVQGRNYIPGPSYRQ |
| | | QRVSTTVTQNNNSEFAWPGASSWALNGRNSLMNPGPAMASHKEGEDRFFPLSGS |
| | | LIFGKQGTGRDNVDADKVMITNEEEIKTTNPVATESYGQVATNHQSAQTLAVPF |
| | | KAQAQTGWVQNQGILPGMVWQDRDVYLQGPIWAKIPHTDGNFHPSPLMGGFGMK |
| | | HPPPQILIKNTPVPADPPTAFNKDKLNSFITQYSTGQVSVEIEWELQKENSKRW |
| | | NPEIQYTSNYYKSNNVEFAVNTEGVYSEPRPIGTRYLTRNL |
| PHP.N | 13 | MAADGYLPDWLEDNLSEGIREWWALKPGAPQPKANQQHQDNARGLVLPGYKYLG |
| (amino | | PGNGLDKGEPVNAADAAALEHDKAYDQQLKAGDNPYLKYNHADAEFQERLKEDT |
| acid) | | SFGGNLGRAVFQAKKRLLEPLGLVEEAAKTAPGKKRPVEQSPQEPDSSAGIGKS |
| | | GAQPAKKRLNFGQTGDTESVPDPQPIGEPPAAPSGVGSLTMASGGGAPVADNNE |
| | | GADGVGSSSGNWHCDSQWLGDRVITTSTRIWALPTYNNHLYKQISNSTSGGSSN |
| | | DNAYFGYSTPWGYFDFNRFHCHFSPRDWQRLINNNWGFRPKRLNFKLFNIQVKE |
| | | VTDNNGVKTIANNLTSTVQVFTDSDYQLPYVLGSAHEGCLPPFPADVFMIPQYG |
| | | YLTLNDGSQAVGRSSFYCLEYFPSQMLRTGNNFQFSYEFENVPFHSSYAHSQSL |
| | | DRLMNPLIDQYLYYLSRTINGSGQNQQTLKFSVAGPSNMAVQGRNYIPGPSYRQ |
| | | QRVSTTVTQNNNSEFAWPGASSWALNGRNSLMNPGPAMASHKEGEDRFFPLSGS |
| | | LIFGKQGTGRDNVDADKVMITNEEEIKTTNPVATESYGQVATNHQSDGTLAVPF |
| | | KAQAQTGWVQNQGILPGMVWQDRDVYLQGPIWAKIPHTDGNFHPSPLMGGFGMK |
| | | HPPPQILIKNTPVPADPPTAFNKDKLNSFITQYSTGQVSVEIEWELQKENSKRW |
| | | NPEIQYTSNYYKSNNVEFAVNTEGVYSEPRPIGTRYLTRNL |
| AAVrh10 | 14 | MAADGYLPDWLEDNLSEGIREWWDLKPGAPKPKANQQKQDDGRGLVLPGYKYLG |
| (amino | | PFNGLDKGEPVNAADAAALEHDKAYDQQLKAGDNPYLRYNHADAEFQERLQEDT |
| acid) | | SFGGNLGRAVFQAKKRVLEPLGLVEEGAKTAPGKKRPVEPSPQRSPDSSTGIGK |
| | | KGQQPAKKRLNFGQTGDSESVPDPQPIGEPPAGPSGLGSGTMAAGGGAPMADNN |
| | | EGADGVGSSSGNWHCDSTWLGDRVITTSTRTWALPTYNNHLYKQISNGTSGGST |
| | | NDNTYFGYSTPWGYFDFNRFHCHFSPRDWQRLINNNWGFRPKRLNFKLFNIQVK |
| | | EVTQNEGTKTIANNLISTIQVFTDSEYQLPYVLGSAHQGCLPPFPADVFMIPQY |
| | | GYLTLNNGSQAVGRSSFYCLEYFPSQMLRTGNNFEFSYQFEDVPFHSSYAHSQS |
| | | LDRLMNPLIDQYLYYLSRTQSTGGTAGTQQLLFSQAGPNNMSAQAKNWLPGPCY |
| | | RQQRVSTTLSQNNNSNFAWTGATKYHLNGRDSLVNPGVAMATHKDDEERFFPSS |
| | | GVLMFGKQGAGKDNVDYSSVMLTSEEEIKTTNPVATEQYGVVADNLQQQNAAPI |
| | | VGAVNSQGALPGMVWQNRDVYLQGPIWAKIPHTDGNFHPSPLMGGFGLKHPPPQ |
| | | ILIKNTPVPADPPTTFSQAKLASFITQYSTGQVSVEIEWELQKENSKRWNPEIQ |
| | | YTSNYYKSTNVDFAVNTDGTYSEPRPIGTRYLTRNL |
| AAVrh10 | 15 | ATGGCTGCCGATGGTTATCTTCCAGATTGGCTCGAGGACAACCTCTCTGAGGGC |
| (DNA) | | ATTCGCGAGTGGTGGGACTTGAAACCTGGAGCCCCGAAACCCAAAGCCAACCAG |
| | | CAAAAGCAGGACGACGGCCGGGGTCTGGTGCTTCCTGGCTACAAGTACCTCGGA |
| | | CCCTTCAACGGACTCGACAAGGGGGAGCCCGTCAACGCGGCGGACGCAGCGGCC |
| | | CTCGAGCACGACAAGGCCTACGACCAGCAGCTCAAAGCGGGTGACAATCCGTAC |
| | | CTGCGGTATAACCACGCCGACGCCGAGTTTCAGGAGCGTCTGCAAGAAGATACG |
| | | TCTTTTGGGGGCAACCTCGGGCGAGCAGTCTTCCAGGCCAAGAAGCGGGTTCTC |
| | | GAACCTCTCGGTCTGGTTGAGGAAGGCGCTAAGACGGCTCCTGGAAAGAAGAGA |
| | | CCGGTAGAGCCATCACCCCAGCGTTCTCCAGACTCCTCTACGGGCATCGGCAAG |
| | | AAAGGCCAGCAGCCCGCGAAAAAGAGACTCAACTTTGGGCAGACTGGCGACTCA |
| | | GAGTCAGTGCCCGACCCTCAACCAATCGGAGAACCCCCCGCAGGCCCCTCTGGT |
| | | CTGGGATCTGGTACAATGGCTGCAGGCGGTGGCGCTCCAATGGCAGACAATAAC |
| | | GAAGGCGCCGACGGAGTGGGTAGTTCCTCAGGAAATTGGCATTGCGATTCCACA |
| | | TGGCTGGGCGACAGAGTCATCACCACCAGCACCCGAACCTGGGCCCTCCCCACC |
| | | TACAACAACCACCTCTACAAGCAAATCTCCAACGGGACTTCGGGAGGAAGCACC |
| | | AACGACAACACCTACTTCGGCTACAGCACCCCCTGGGGGTATTTTGACTTTAAC |
| | | AGATTCCACTGCCACTTCTCACCACGTGACTGGCAGCGACTCATCAACAACAAC |
| | | TGGGGATTCCGGCCCAAGAGACTCAACTTCAAGCTCTTCAACATCCAGGTCAAG |
| | | GAGGTCACGCAGAATGAAGGCACCAAGACCATCGCCAATAACCTTACCAGCACG |
| | | ATTCAGGTCTTTACGGACTCGGAATACCAGCTCCCGTACGTCCTCGGCTCTGCG |
| | | CACCAGGGCTGCCTGCCTCCGTTCCCGGCGGACGTCTTCATGATTCCTCAGTAC |
| | | GGGTACCTGACTCTGAACAATGGCAGTCAGGCCGTGGGCCGTTCCTCCTTCTAC |
| | | TGCCTGGAGTACTTTCCTTCTCAAATGCTGAGAACGGGCAACAACTTTGAGTTC |
| | | AGCTACCAGTTTGAGGACGTGCCTTTTCACAGCAGCTACGCGCACAGCCAAAGC |
| | | CTGGACCGGCTGATGAACCCCCTCATCGACCAGTACCTGTACTACCTGTCTCGG |
| | | ACTCAGTCCACGGGAGGTACCGCAGGAACTCAGCAGTTGCTATTTTCTCAGGCC |
| | | GGGCCTAATAACATGTCGGCTCAGGCCAAAAACTGGCTACCCGGGCCCTGCTAC |
| | | CGGCAGCAACGCGTCTCCACGACACTGTCGCAAAATAACAACAGCAACTTTGCC |
| | | TGGACCGGTGCCACCAAGTATCATCTGAATGGCAGAGACTCTCTGGTAAATCCC |
| | | GGTGTCGCTATGGCAACCCACAAGGACGACGAAGAGCGATTTTTTCCGTCCAGC |
| | | GGAGTCTTAATGTTTGGGAAACAGGGAGCTGGAAAAGACAACGTGGACTATAGC |
| | | AGCGTTATGCTAACCAGTGAGGAAGAAATTAAAACCACCAACCCAGTGGCCACA |
| | | GAACAGTACGGCGTGGTGGCCGATAACCTGCAACAGCAAAACGCCGCTCCTATT |
| | | GTAGGGGCCGTCAACAGTCAAGGAGCCTTACCTGGCATGGTCTGGCAGAACCGG |
| | | GACGTGTACCTGCAGGGTCCTATCTGGGCCAAGATTCCTCACACGGACGGAAAC |
| | | TTTCATCCCTCGCCGCTGATGGGAGGCTTTGGACTGAAACACCCGCCTCCTCAG |
| | | ATCCTGATTAAGAATACACCTGTTCCCGCGGATCCTCCAACTACCTTCAGTCAA |
| | | GCTAAGCTGGCGTCGTTCATCACGCAGTACAGCACCGGACAGGTCAGCGTGGAA |
| | | ATTGAATGGGAGCTGCAGAAAGAAAACAGCAAACGCTGGAACCCAGAGATTCAA |
| | | TACACTTCCAACTACTACAAATCTACAAATGTGGACTTTGCTGTTAACACAGAT |
| | | GGCACTTATTCTGAGCCTCGCCCCATCGGCACCCGTTACCTCACCCGTAATCTG |
| | | TAA |
| AAV2 | 16 | MAADGYLPDWLEDTLSEGIRQWWKLKPGPPPPKPAERHKDDSRGLVLPGYKYLG |
| (amino | | PFNGLDKGEPVNEADAAALEHDKAYDRQLDSGDNPYLKYNHADAEFQERLKEDT |
| acid) | | SFGGNLGRAVFQAKKRVLEPLGLVEEPVKTAPGKKRPVEHSPVEPDSSSGTGKA |
| | | GQQPARKRLNFGQTGDADSVPDPQPLGQPPAAPSGLGINTMATGSGAPMADNNE |
| | | GADGVGNSSGNWHCDSTWMGDRVITTSTRTWALPTYNNHLYKQISSQSGASNDN |
| | | HYFGYSTPWGYFDFNRFHCHFSPRDWQRLINNNWGFRPKRLNFKLFNIQVKEVT |
| | | QNDGITTIANNLTSTVQVFTDSEYQLPYVLGSAHQGCLPPFPADVFMVPQYGYL |
| | | TLNNGSQAVGRSSFYCLEYFPSQMLRTGNNFTFSYTFEDVPFHSSYAHSQSLDR |
| | | LMNPLIDQYLYYLSRINTPSGITTQSRLQFSQAGASDIRDQSRNWLPGPCYRQQ |
| | | RVSKTSADNNNSEYSWTGATKYHLNGRDSLVNPGPAMASHKDDEEKFFPQSGVL |
| | | IFGKQGSEKTNVDIEKVMITDEEEIRTTNPVATEQYGSVSTNLQRGNRQAATAD |
| | | VNTQGVLPGMVWQDRDVYLQGPIWAKIPHTDGHFHPSPLMGGFGLKHPPPQILI |
| | | KNTPVPANPSTTFSAAKFASFITQYSTGQVSVEIEWELQKENSKRWNPEIQYTS |
| | | NYNKSVNVDFTVDINGVYSEPRPIGTRYLTRNL |
| AAV2 | 17 | ATGGCTGCCGATGGTTATCTTCCAGATTGGCTCGAGGACACTCTCTCTGAAGGA |
| (DNA) | | ATAAGACAGTGGTGGAAGCTCAAACCTGGCCCACCACCACCAAAGCCCGCAGAG |
| | | CGGCATAAGGACGACAGCAGGGGTCTTGTGCTTCCTGGGTACAAGTACCTCGGA |
| | | CCCTTCAACGGACTCGACAAGGGAGAGCCGGTCAACGAGGCAGACGCCGCGGCC |
| | | CTCGAGCACGACAAAGCCTACGACCGGCAGCTCGACAGCGGAGACAACCCGTAC |
| | | CTCAAGTACAACCACGCCGACGCGGAGTTTCAGGAGCGCCTTAAAGAAGATACG |
| | | TCTTTTGGGGGCAACCTCGGACGAGCAGTCTTCCAGGCGAAAAAGAGGGTTCTT |
| | | GAACCTCTGGGCCTGGTTGAGGAACCTGTTAAGACGGCTCCGGGAAAAAAGAGG |
| | | CCGGTAGAGCACTCTCCTGTGGAGCCAGACTCCTCCTCGGGAACCGGAAAGGCG |
| | | GGCCAGCAGCCTGCAAGAAAAAGATTGAATTTTGGTCAGACTGGAGACGCAGAC |
| | | TCAGTACCTGACCCCCAGCCTCTCGGACAGCCACCAGCAGCCCCCTCTGGTCTG |
| | | GGAACTAATACGATGGCTACAGGCAGTGGCGCACCAATGGCAGACAATAACGAG |
| | | GGCGCCGACGGAGTGGGTAATTCCTCGGGAAATTGGCATTGCGATTCCACATGG |
| | | ATGGGCGACAGAGTCATCACCACCAGCACCCGAACCTGGGCCCTGCCCACCTAC |
| | | AACAACCACCTCTACAAACAAATTTCCAGCCAATCAGGAGCCTCGAACGACAAT |
| | | CACTACTTTGGCTACAGCACCCCTTGGGGGTATTTTGACTTCAACAGATTCCAC |
| | | TGCCACTTTTCACCACGTGACTGGCAAAGACTCATCAACAACAACTGGGGATTC |
| | | CGACCCAAGAGACTCAACTTCAAGCTCTTTAACATTCAAGTCAAAGAGGTCACG |
| | | CAGAATGACGGTACGACGACGATTGCCAATAACCTTACCAGCACGGTTCAGGTG |
| | | TTTACTGACTCGGAGTACCAGCTCCCGTACGTCCTCGGCTCGGCGCATCAAGGA |
| | | TGCCTCCCGCCGTTCCCAGCAGACGTCTTCATGGTGCCACAGTATGGATACCTC |
| | | ACCCTGAACAACGGGAGTCAGGCAGTAGGACGCTCTTCATTTTACTGCCTGGAG |
| | | TACTTTCCTTCTCAGATGCTGCGTACCGGAAACAACTTTACCTTCAGCTACACT |
| | | TTTGAGGACGTTCCTTTCCACAGCAGCTACGCTCACAGCCAGAGTCTGGACCGT |
| | | CTCATGAATCCTCTCATCGACCAGTACCTGTATTACTTGAGCAGAACAAACACT |
| | | CCAAGTGGAACCACCACGCAGTCAAGGCTTCAGTTTTCTCAGGCCGGAGCGAGT |
| | | GACATTCGGGACCAGTCTAGGAACTGGCTTCCTGGACCCTGTTACCGCCAGCAG |
| | | CGAGTATCAAAGACATCTGCGGATAACAACAACAGTGAATACTCGTGGACTGGA |
| | | GCTACCAAGTACCACCTCAATGGCAGAGACTCTCTGGTGAATCCGGGCCCGGCC |
| | | ATGGCAAGCCACAAGGACGATGAAGAAAAGTTTTTTCCTCAGAGCGGGGTTCTC |
| | | ATCTTTGGGAAGCAAGGCTCAGAGAAAACAAATGTGGACATTGAAAAGGTCATG |
| | | ATTACAGACGAAGAGGAAATCAGGACAACCAATCCCGTGGCTACGGAGCAGTAT |
| | | GGTTCTGTATCTACCAACCTCCAGAGAGGCAACAGACAAGCAGCTACCGCAGAT |
| | | GTCAACACACAAGGCGTTCTTCCAGGCATGGTCTGGCAGGACAGAGATGTGTAC |
| | | CTTCAGGGGCCCATCTGGGCAAAGATTCCACACACGGACGGACATTTTCACCCC |
| | | TCTCCCCTCATGGGTGGATTCGGACTTAAACACCCTCCTCCACAGATTCTCATC |
| | | AAGAACACCCCGGTACCTGCGAATCCTTCGACCACCTTCAGTGCGGCAAAGTTT |
| | | GCTTCCTTCATCACACAGTACTCCACGGGACAGGTCAGCGTGGAGATCGAGTGG |
| | | GAGCTGCAGAAGGAAAACAGCAAACGCTGGAATCCCGAAATTCAGTACACTTCC |
| | | AACTACAACAAGTCTGTTAATGTGGACTTTACTGTGGACACTAATGGCGTGTAT |
| | | TCAGAGCCTCGCCCCATTGGCACCAGATACCTGACTCGTAATCTGTAA |
| AAV1 | 18 | MAADGYLPDWLEDNLSEGIREWWDLKPGAPKPKANQQKQDDGRGLVLPGYKYLG |
| (amino | | PFNGLDKGEPVNAADAAALEHDKAYDQQLKAGDNPYLRYNHADAEFQERLQEDT |
| acid) | | SFGGNLGRAVFQAKKRVLEPLGLVEEGAKTAPGKKRPVEQSPQEPDSSSGIGKT |
| | | GQQPAKKRLNFGQTGDSESVPDPQPLGEPPATPAAVGPTTMASGGGAPMADNNE |
| | | GADGVGNASGNWHCDSTWLGDRVITTSTRIWALPTYNNHLYKQISSASTGASND |
| | | NHYFGYSTPWGYFDFNRFHCHFSPRDWQRLINNNWGFRPKRLNFKLFNIQVKEV |
| | | TTNDGVTTIANNLTSTVQVFSDSEYQLPYVLGSAHQGCLPPFPADVEMIPQYGY |
| | | LTLNNGSQAVGRSSFYCLEYFPSQMLRTGNNFTFSYTFEEVPFHSSYAHSQSLD |
| | | RLMNPLIDQYLYYLNRTQNQSGSAQNKDLLFSRGSPAGMSVQPKNWLPGPCYRQ |
| | | QRVSKTKTDNNNSNFTWTGASKYNLNGRESIINPGTAMASHKDDEDKFFPMSGV |
| | | MIFGKESAGASNTALDNVMITDEEEIKATNPVATERFGTVAVNFQSSSTDPATG |
| | | DVHAMGALPGMVWQDRDVYLQGPIWAKIPHTDGHFHPSPLMGGFGLKNPPPQIL |
| | | IKNTPVPANPPAEFSATKFASFITQYSTGQVSVEIEWELQKENSKRWNPEVQYT |
| | | SNYAKSANVDFTVDNNGLYTEPRPIGTRYLTRPL |
| AAV1 | 19 | atggctgccgatggttatcttccagattggctcgaggacaacctctctgagggc |
| (DNA) | | attcgcgagtggtgggacttgaaacctggagccccgaagcccaaagccaaccag |
| | | caaaagcaggacgacggccggggtctggtgcttcctggctacaagtacctcgga |
| | | cccttcaacggactcgacaagggggagcccgtcaacgcggcggacgcagcggcc |
| | | ctcgagcacgacaaggcctacgaccagcagctcaaagcgggtgacaatccgtac |
| | | ctgcggtataaccacgccgacgccgagtttcaggagcgtctgcaagaagatacg |
| | | tcttttgggggcaacctcgggcgagcagtcttccaggccaagaagcgggttctc |
| | | gaacctctcggtctggttgaggaaggcgctaagacggctcctggaaagaaacgt |
| | | ccggtagagcagtcgccacaagagccagactcctcctcgggcatcggcaagaca |
| | | ggccagcagcccgctaaaaagagactcaattttggtcagactggcgactcagag |
| | | tcagtccccgatccacaacctctcggagaacctccagcaacccccgctgctgtg |
| | | ggacctactacaatggcttcaggcggtggcgcaccaatggcagacaataacgaa |
| | | ggcgccgacggagtgggtaatgcctcaggaaattggcattgcgattccacatgg |
| | | ctgggcgacagagtcatcaccaccagcacccgcacctgggccttgcccacctac |
| | | aataaccacctctacaagcaaatctccagtgcttcaacgggggccagcaacgac |
| | | aaccactacttcggctacagcaccccctgggggtattttgatttcaacagattc |
| | | cactgccacttttcaccacgtgactggcagcgactcatcaacaacaattgggga |
| | | ttccggcccaagagactcaacttcaaactcttcaacatccaagtcaaggaggtc |
| | | acgacgaatgatggcgtcacaaccatcgctaataaccttaccagcacggttcaa |
| | | gtcttctcggactcggagtaccagcttccgtacgtcctcggctctgcgcaccag |
| | | ggctgcctccctccgttcccggcggacgtgttcatgattccgcaatacggctac |
| | | ctgacgctcaacaatggcagccaagccgtgggacgttcatccttttactgcctg |
| | | gaatatttcccttctcagatgctgagaacgggcaacaactttaccttcagctac |
| | | acctttgaggaagtgcctttccacagcagctacgcgcacagccagagcctggac |
| | | cggctgatgaatcctctcatcgaccaatacctgtattacctgaacagaactcaa |
| | | aatcagtccggaagtgcccaaaacaaggacttgctgtttagccgtgggtctcca |
| | | gctggcatgtctgttcagcccaaaaactggctacctggaccctgttatcggcag |
| | | cagcgcgtttctaaaacaaaaacagacaacaacaacagcaattttacctggact |
| | | ggtgcttcaaaatataacctcaatgggcgtgaatccatcatcaaccctggcact |
| | | gctatggcctcacacaaagacgacgaagacaagttctttcccatgagcggtgtc |
| | | atgatttttggaaaagagagcgccggagcttcaaacactgcattggacaatgtc |
| | | atgattacagacgaagaggaaattaaagccactaaccctgtggccaccgaaaga |
| | | tttgggaccgtggcagtcaatttccagagcagcagcacagaccctgcgaccgga |
| | | gatgtgcatgctatgggagcattacctggcatggtgtggcaagatagagacgtg |
| | | tacctgcagggtcccatttgggccaaaattcctcacacagatggacactttcac |
| | | ccgtctcctcttatgggcggctttggactcaagaacccgcctcctcagatcctc |
| | | atcaaaaacacgcctgttcctgcgaatcctccggcggagttttcagctacaaag |
| | | tttgcttcattcatcacccaatactccacaggacaagtgagtgtggaaattgaa |
| | | tgggagctgcagaaagaaaacagcaagcgctggaatcccgaagtgcagtacaca |
| | | tccaattatgcaaaatctgccaacgttgattttactgtggacaacaatggactt |
| | | tatactgagcctcgccccattggcacccgttaccttacccgtcccctgtaa |
| AAV5 | 20 | MSFVDHPPDWLEEVGEGLREFLGLEAGPPKPKPNQQHQDQARGLVLPGYNYLGP |
| (amino | | GNGLDRGEPVNRADEVAREHDISYNEQLEAGDNPYLKYNHADAEFQEKLADDTS |
| acid) | | FGGNLGKAVFQAKKRVLEPFGLVEEGAKTAPTGKRIDDHFPKRKKARTEEDSKP |
| | | STSSDAEAGPSGSQQLQIPAQPASSLGADTMSAGGGGPLGDNNQGADGVGNASG |
| | | DWHCDSTWMGDRVVTKSTRTWVLPSYNNHQYREIKSGSVDGSNANAYFGYSTPW |
| | | GYFDFNRFHSHWSPRDWQRLINNYWGFRPRSLRVKIFNIQVKEVTVQDSTTTIA |
| | | NNLTSTVQVFTDDDYQLPYVVGNGTEGCLPAFPPQVFTLPQYGYATLNRDNTEN |
| | | PTERSSFFCLEYFPSKMLRTGNNFEFTYNFEEVPFHSSFAPSQNLFKLANPLVD |
| | | QYLYRFVSTNNTGGVQFNKNLAGRYANTYKNWFPGPMGRTQGWNLGSGVNRASV |
| | | SAFAITNRMELEGASYQVPPQPNGMINNLQGSNTYALENTMIFNSQPANPGTTA |
| | | TYLEGNMLITSESETQPVNRVAYNVGGQMATNNQSSTTAPATGTYNLQEIVPGS |
| | | VWMERDVYLQGPIWAKIPETGAHFHPSPAMGGFGLKHPPPMMLIKNTPVPGNIT |
| | | SFSDVPVSSFITQYSTGQVTVEMEWELKKENSKRWNPEIQYTNNYNDPQFVDFA |
| | | PDSTGEYRTTRPIGTRYLTRPL |
| AAV5 | 21 | atgtcttttgttgatcaccctccagattggttggaagaagttggtgaaggtctt |
| (DNA) | | cgcgagtttttgggccttgaagcgggcccaccgaaaccaaaacccaatcagcag |
| | | catcaagatcaagcccgtggtcttgtgctgcctggttataactatctcggaccc |
| | | ggaaacggtctcgatcgaggagagcctgtcaacagggcagacgaggtcgcgcga |
| | | gagcacgacatctcgtacaacgagcagcttgaggcgggagacaacccctacctc |
| | | aagtacaaccacgcggacgccgagtttcaggagaagctcgccgacgacacatcc |
| | | ttcgggggaaacctcggaaaggcagtctttcaggccaagaaaagggttctcgaa |
| | | ccttttggcctggttgaagagggtgctaagacggcccctaccggaaagcggata |
| | | gacgaccactttccaaaaagaaagaaggcccggaccgaagaggactccaagcct |
| | | tccacctcgtcagacgccgaagctggacccagcggatcccagcagctgcaaatc |
| | | ccagcccaaccagcctcaagtttgggagctgatacaatgtctgcgggaggtggc |
| | | ggcccattgggcgacaataaccaaggtgccgatggagtgggcaatgcctcggga |
| | | gattggcattgcgattccacgtggatgggggacagagtcgtcaccaagtccacc |
| | | cgaacctgggtgctgcccagctacaacaaccaccagtaccgagagatcaaaagc |
| | | ggctccgtcgacggaagcaacgccaacgcctactttggatacagcaccccctgg |
| | | gggtactttgactttaaccgcttccacagccactggagcccccgagactggcaa |
| | | agactcatcaacaactactggggcttcagaccccggtccctcagagtcaaaatc |
| | | ttcaacattcaagtcaaagaggtcacggtgcaggactccaccaccaccatcgcc |
| | | aacaacctcacctccaccgtccaagtgtttacggacgacgactaccagctgccc |
| | | tacgtcgtcggcaacgggaccgagggatgcctgccggccttccctccgcaggtc |
| | | tttacgctgccgcagtacggttacgcgacgctgaaccgcgacaacacagaaaat |
| | | cccaccgagaggagcagcttcttctgcctagagtactttcccagcaagatgctg |
| | | agaacgggcaacaactttgagtttacctacaactttgaggaggtgcccttccac |
| | | tccagcttcgctcccagtcagaacctcttcaagctggccaacccgctggtggac |
| | | cagtacttgtaccgcttcgtgagcacaaataacactggcggagtccagttcaac |
| | | aagaacctggccgggagatacgccaacacctacaaaaactggttcccggggccc |
| | | atgggccgaacccagggctggaacctgggctccggggtcaaccgcgccagtgtc |
| | | agcgccttcgccacgaccaataggatggagctcgagggcgcgagttaccaggtg |
| | | cccccgcagccgaacggcatgaccaacaacctccagggcagcaacacctatgcc |
| | | ctggagaacactatgatcttcaacagccagccggcgaacccgggcaccaccgcc |
| | | acgtacctcgagggcaacatgctcatcaccagcgagagcgagacgcagccggtg |
| | | aaccgcgtggcgtacaacgtcggcgggcagatggccaccaacaaccagagctcc |
| | | accactgcccccgcgaccggcacgtacaacctccaggaaatcgtgcccggcagc |
| | | gtgtggatggagagggacgtgtacctccaaggacccatctgggccaagatccca |
| | | gagacgggggcgcactttcacccctctccggccatgggcggattcggactcaaa |
| | | cacccaccgcccatgatgctcatcaagaacacgcctgtgcccggaaatatcacc |
| | | agcttctcggacgtgcccgtcagcagcttcatcacccagtacagcaccgggcag |
| | | gtcaccgtggagatggagtgggagctcaagaaggaaaactccaagaggtggaac |
| | | ccagagatccagtacacaaacaactacaacgacccccagtttgtggactttgcc |
| | | ccggacagcaccggggaatacagaaccaccagacctatcggaacccgatacctt |
| | | acccgacccctttaa |

[1255] In some embodiments, the AAV capsid polypeptide, e.g., the AAV capsid variant, comprises the amino acid sequence of any of SEQ ID NOs: 1, 11, 138, 12, 13, 14, 16, 18, 20, or an amino acid sequence substantially identical (e.g., having at least 70%, 75%, 80%, 85%, 90%, 92%, 95%, 97%, 98%, or 99% sequence identity) thereto. In some embodiments the AAV capsid polypeptide, e.g., the AAV capsid variant, comprises an amino acid sequence comprising at least one, two, or three modifications, e.g., substitutions (e.g., conservative substitutions), insertions, or deletions, but no more than 30, 20, or 10 modifications, e.g., substitutions (e.g., conservative substitutions), insertions, or deletions, relative to the amino acid sequence of any of SEQ ID NOs: 1, 11, 138, 12, 13, 14, 16, 18, 20. In some embodiments, the AAV capsid polypeptide, e.g., the AAV capsid variant, comprises an amino acid sequence encoded by the nucleotide sequence of any of SEQ ID NOs: 137, 15, 17, 19, 21, or a nucleotide sequence substantially identical (e.g., having at least 70%, 75%, 80%, 85%, 90%, 92%, 95%, 97%, 98%, or 99% sequence identity) thereto.

[1256] In some embodiments, the nucleotide sequence encoding the AAV capsid polypeptide, e.g., the AAV capsid variant, comprises the nucleotide sequence of any of SEQ ID NOs: 137, 15, 17, 19, or 21, or a nucleotide sequence substantially identical (e.g., having at least 70%, 75%, 80%, 85%, 90%, 92%, 95%, 97%, 98%, or 99% sequence identity) thereto. In some embodiments, the nucleotide sequence encoding the AAV capsid polypeptide, e.g., the AAV capsid variant, comprises a nucleotide sequence comprising at least one, two, or three modifications, e.g., substitutions (e.g., conservative substitutions), insertions, or deletions, but no more than 30, 20, or 10 modifications, e.g., substitutions (e.g., conservative substitutions), insertions, or deletions, relative to the nucleotide sequence of any of SEQ ID NOs: 137, 15, 17, 19, or 21.

[1257] In some embodiments, the AAV capsid polypeptide, e.g., the AAV capsid variant, comprises the amino acid sequence of SEQ ID NO: 138 or an amino acid sequence substantially identical (e.g., having at least 70%, 75%, 80%, 85%, 90%, 92%, 95%, 97%, 98%, or 99% sequence identity) thereto. In some embodiments the AAV capsid polypeptide, e.g., the AAV capsid variant, comprises an amino acid sequence comprising at least one, two, or three modifications, e.g., substitutions (e.g., conservative substitutions), but no more than 30, 20, or 10 modifications, e.g., substitutions (e.g., conservative substitutions), relative to the amino acid sequence of SEQ ID NO: 138. In some embodiments, the AAV capsid polypeptide, e.g., the AAV capsid variant, comprises an amino acid sequence encoded by the nucleotide sequence of SEQ ID NO: 137 or a nucleotide sequence substantially identical (e.g., having at least 70%, 75%, 80%, 85%, 90%, 92%, 95%, 97%, 98%, or 99% sequence identity) thereto. In some embodiments, the nucleotide sequence encoding the AAV capsid polypeptide, e.g., the AAV capsid variant, comprises the nucleotide sequence of SEQ ID NO: 137 or a nucleotide sequence substantially identical (e.g., having at least 70%, 75%, 80%, 85%, 90%, 92%, 95%, 97%, 98%, or 99% sequence identity) thereto. In some embodiments, the AAV capsid polypeptide, e.g., the AAV capsid variant, comprises substitution at position K449, e.g., a K449R substitution, numbered according to SEQ ID NO: 138.

[1258] In some embodiments, the AAV capsid polypeptide, e.g., the AAV capsid variant, comprises a peptide comprising the amino acid sequence of TLAVPFK (SEQ ID NO: 1262). In some embodiments, the peptide is present immediately subsequent to position 588, relative to a reference sequence numbered according to SEQ ID NO: 138. In some embodiments, the capsid polypeptide comprises the amino acid substitutions of A587D and Q588G, numbered according to SEQ ID NO: 138.

[1259] In some embodiments, the AAV capsid polypeptide, e.g., the AAV capsid variant, comprises the amino acid substitution of K449R, numbered according to SEQ ID NO: 138; and a peptide comprising the amino acid sequence of TLAVPFK, wherein the peptide is present immediately subsequent to position 588, relative to a reference sequence numbered according to SEQ ID NO: 138.

[1260] In some embodiments, the AAV capsid polypeptide, e.g., the AAV capsid variant, comprises the amino acid substitution of K449R, numbered according to SEQ ID NO: 138; an peptide comprising the amino acid sequence of TLAVPFK (SEQ ID NO: 1262), wherein the insert is present immediately subsequent to position 588, relative to a reference sequence numbered according to SEQ ID NO: 138; and the amino acid substitutions of A587D and Q588G, numbered according to SEQ ID NO: 138.

[1261] In some embodiments, the AAV capsid polypeptide, e.g., the AAV capsid variant, comprises a peptide comprising the amino acid sequence of TLAVPFK (SEQ ID NO: 1262), wherein the insert is present immediately subsequent to position 588, relative to a reference sequence numbered according to SEQ ID NO: 138; and the amino acid substitutions of A587D and Q588G, numbered according to SEQ ID NO: 138.

[1262] In some embodiments, the AAV capsid polypeptide, e.g., the AAV capsid variant, comprises the amino acid sequence of SEQ ID NO: 11 or an amino acid sequence substantially identical (e.g., having at least 70%, 75%, 80%, 85%, 90%, 92%, 95%, 97%, 98%, or 99% sequence identity) thereto. In some embodiments the AAV capsid polypeptide, e.g., the AAV capsid variant, comprises an amino acid sequence comprising at least one, two, or three modifications, e.g., substitutions (e.g., conservative substitutions), but no more than 30, 20, or 10 modifications, e.g., substitutions (conservative substitutions), relative to the amino acid sequence of SEQ ID NO: 11, optionally wherein position 449 is not R.

[1263] In some embodiments, the capsid polypeptide, comprises the amino acid sequence of SEQ ID NO: 1 or an amino acid sequence substantially identical (e.g., having at least 70%, 75%, 80%, 85%, 90%, 92%, 95%, 97%, 98%, or 99% sequence identity) thereto. In some embodiments the AAV capsid polypeptide, e.g., the AAV capsid variant, comprises an amino acid sequence comprising at least one, two, or three modifications, e.g., substitutions (e.g., conservative substitutions), but no more than 30, 20, or 10 modifications, e.g., substitutions (e.g., conservative substitutions), relative to the amino acid sequence of SEQ ID NO: 1.

[1264] In some embodiments, an AAV capsid variant disclosed herein comprises a modification in loop VIII of AAV9, e.g., at positions between 580-599, e.g., at positions 587, 588, 589, and/or 590, numbered relative to SEQ ID NO: 5, 8, 138 or 3636-3647. In some embodiments, loop (e.g., loop VIII) is used interchangeably herein with the term variable region (e.g., variable region VIII), or VR (e.g., VR-VIII). In some embodiments loop VIII comprises positions 580-599 (e.g., amino acids VATNHQSAQAQAQTGWVQNQ (SEQ ID NO: 1195)), numbered according to SEQ ID NO: 138. In some embodiments, loop VIII comprises positions 582-593 (e.g., amino acids TNHQSAQAQAQT (SEQ ID NO: 1196)), numbered according to SEQ ID NO: 138. In some embodiments loop VIII comprises positions 587-593 (e.g., amino acids AQAQAQT (SEQ ID NO: 1197)), numbered according to SEQ ID NO: 138. In some embodiments loop VIII comprises positions 587-590 (e.g., amino acids AQAQ), numbered according to SEQ ID NO: 138. In some embodiments, loop VIII or variable region VIII (VR-VIII) is as described in DiMattia et al. “Structural Insights into the Unique Properties of the Adeno-Associated Virus Serotype 9,” Journal of Virology, 12(86):6947-6958 (the contents of which are hereby incorporated by reference in their entirety), e.g., comprising positions 581-593 (e.g., ATNHQSAQAQAQT (SEQ ID NO: 1198)), numbered according to SEQ ID NO: 138.

[1265] In some embodiments, an AAV particle described herein comprises an AAV capsid polypeptide, e.g., an AAV capsid variant. In some embodiments, the AAV capsid polypeptide, e.g., the AAV capsid variant, comprises a peptide sequence as described in Table 2, e.g., any one of peptides 1, 2, 3, 4, 5, 6, 7, 8, 9, 10, 11, or 12. In some embodiments, the peptide may increase distribution of an AAV particle to a cell, region, or tissue of the CNS. The cell of the CNS may be, but is not limited to, neurons (e.g., excitatory, inhibitory, motor, sensory, autonomic, sympathetic, parasympathetic, Purkinje, Betz, etc.), glial cells (e.g., microglia, astrocytes, oligodendrocytes) and/or supporting cells of the brain such as immune cells (e.g., T cells). The tissue of the CNS may be, but is not limited to, the cortex (e.g., frontal, parietal, occipital, temporal), thalamus, hypothalamus, striatum, putamen, caudate nucleus, hippocampus, entorhinal cortex, basal ganglia, or deep cerebellar nuclei. In some embodiments, the peptide may increase biodistribution of an AAV particle to a cell, region, or tissue of the PNS. The cell or tissue of the PNS may be, but is not limited to, a dorsal root ganglion (DRG). In some embodiments, the peptide may increase biodistribution of an AAV particle to the CNS (e.g., the cortex) after intravenous administration. In some embodiments, the peptide may increase biodistribution of an AAV particle to the CNS (e.g., the cortex) following focused ultrasound (FUS), e.g., coupled with the intravenous administration of microbubbles (FUS-MB), or MRI-guided FUS coupled with intravenous administration. In some embodiments, the peptide may increase biodistribution of an AAV particle to the PNS (e.g., DRG) after intravenous administration. In some embodiments, the peptide may increase biodistribution of an AAV particle to the PNS (e.g., DRG) following focused ultrasound (FUS), e.g., coupled with the intravenous administration of microbubbles (FUS-MB), or MRI-guided FUS coupled with intravenous administration. In some embodiments, the peptide may increase biodistribution of an AAV particle to a cell, region, or tissue of a muscle. In some embodiments, the muscle is a heart muscle. In some embodiments, the peptide may direct an AAV particle to a muscle cell, region, or tissue after intravenous administration.

TABLE 2
Exemplary Peptide Sequences

| | SEQ | Amino | SEQ | |
|---|---|---|---|---|
| Pep- | ID | Acid | ID | Nucleotide |
| tide | NO: | Sequence | NO: | Sequence |
| 1 | 3648 | PLNGAVH | 3660 | CCGCTTAATGGTGCCGTCCAT |
| | | LY | | CTTTAT |
| 2 | 3649 | RDSPKGW | 3661 | CGTGATTCTCCGAAGGGTTGG |
| | | | | CA |
| 3 | 3650 | YSTDVRM | 3662 | TATTCTACGGATGTGAGGATG |
| | | | | CA |
| 4 | 3651 | IVMNSLK | 3663 | ATTGTTATGAATTCGTTGAAG |
| | | | | GC |
| 5 | 3652 | RESPRGL | 3664 | CGGGAGAGTCCTCGTGGGCTG |
| | | | | CA |
| 6 | 3653 | SENDTRA | 3665 | AGTTTTAATGATACTAGGGCT |
| | | | | CA |
| 7 | 3654 | GGTLAVV | 3666 | GGTGGTACGTTGGCCGTCGTG |
| | | SL | | TCGCTT |
| 8 | 3655 | YGLPKGP | 3667 | TATGGGTTGCCGAAGGGTCCT |
| 9 | 3656 | STGTLRL | 3668 | TCGACTGGGACGCTTCGGCTT |
| 10 | 3657 | YSTDERM | 3669 | TATTCGACGGATGAGAGGATG |
| 11 | 3658 | YSTDERK | 3670 | TATTCGACGGATGAGAGGAAG |
| 12 | 3659 | YVSSVKM | 3671 | TATGTTTCGTCTGTTAAGATG |
| 13 | 314 | PLNGAVH | 6 | CCGCTTAATGGTGCCGTCCAT |
| | | LYAQAQT | | CTTTATGCTCAGGCGCAGACC |
| | | GWVPN | | GGCTGGGTTCCGAAC |
| 14 | 566 | PLNGAVH | 9 | CCGCTGAATGGTGCGGTGCAT |
| | | LYAQAQL | | CTGTATGCGCAGGCGCAGCTG |
| | | SPVKN | | TCTCCGGTGAAGAAT |

[1266] In some embodiments, the AAV capsid polypeptide, e.g., the AAV capsid variant, comprises at least 3, 4, 5, 6, 7, 8, or 9 consecutive amino acids from the amino acid sequence of any of SEQ ID NO: 3648-3659. In some embodiments, the amino acid sequence is present in loop VIII. In some embodiments, the amino acid sequence is present immediately subsequent to position 586, 588, or 589, relative to a reference sequence numbered according to the amino acid sequence of SEQ ID NO: 138.

[1267] In some embodiments, the AAV capsid polypeptide, e.g., the AAV capsid variant, comprises an amino acid sequence comprising at least one, two, or three but no more than four modifications, e.g., substitutions, (e.g., conservative substitutions), insertions, or deletions, relative to any of the amino acid sequence of Table 20. In some embodiments, the AAV capsid polypeptide, e.g., the AAV capsid variant, comprises an amino acid sequence comprising at least one, two, or three but no more than four different amino acids, relative to any of the amino acid sequence of Table 20. In some embodiments, the AAV capsid variant comprises an amino acid sequence comprising at least one, two, or three but no more than four modifications, e.g., substitutions, (e.g., conservative substitutions), insertions, or deletions, relative to the amino acid sequence of any of SEQ ID NO: 3648-3659. In some embodiments, the AAV capsid variant comprises an amino acid sequence comprising at least one, two, or three but no more than four different amino acids relative to the amino acid sequence of any of SEQ ID NO: 3648-3659. In some embodiments, the amino acid sequence is present in loop VIII. In some embodiments, the amino acid sequence is present immediately subsequent to position 586, 588, or 589, relative to a reference sequence numbered according to the amino acid sequence of SEQ ID NO: 138.

[1268] In some embodiments, the AAV capsid polypeptide, e.g., the AAV capsid variant, comprises at least 3, 4, 5, 6, 7, 8, or 9 consecutive amino acids from the amino acid sequence of any of SEQ ID NO: 3648-3659. In some embodiments, the 3 consecutive amino acids comprise PLN. In some embodiments, the 4 consecutive amino acids comprise PLNG (SEQ ID NO: 3678). In some embodiments, the 5 consecutive amino acids comprise PLNGA (SEQ ID NO: 3679). In some embodiments, the 6 consecutive amino acids comprise PLNGAV (SEQ ID NO: 3680). In some embodiments, the 7 consecutive amino acids comprise PLNGAVH (SEQ ID NO: 3681). In some embodiments, the 8 consecutive amino acids comprise PLNGAVHL (SEQ ID NO: 3682). In some embodiments, the 9 consecutive amino acids comprise PLNGAVHLY (SEQ ID NO: 3648).

[1269] In some embodiments, the four consecutive amino acids comprise NGAV (SEQ ID NO: 3683). In some embodiments, the four consecutive amino acids comprise GAVH (SEQ ID NO: 3684). In some embodiments, the five consecutive amino acids comprise NGAVH (SEQ ID NO: 3685). In some embodiments, the five consecutive amino acids comprise GAVHL (SEQ ID NO: 3686). In some embodiments, the five consecutive amino acids comprise AVHLY (SEQ ID NO: 3687). In some embodiments, the six consecutive amino acids comprise NGAVHL (SEQ ID NO: 3688). In some embodiments, the seven consecutive amino acids comprise NGAVHLY (SEQ ID NO: 3689).

[1270] In some embodiments, the 3 consecutive amino acids comprise YST. In some embodiments, the 4 consecutive amino acids comprise YSTD (SEQ ID NO: 3690). In some embodiments, the 5 consecutive amino acids comprise YSTDE (SEQ ID NO: 3691). In some embodiments, the 5 consecutive amino acids comprise YSTDV (SEQ ID NO: 3700). In some embodiments, the 6 consecutive amino acids comprise YSTDER (SEQ ID NO: 3692). In some embodiments, the 6 consecutive amino acids comprise YSTDVR (SEQ ID NO: 3701). In some embodiments, the 7 consecutive amino acids comprise YSTDERM (SEQ ID NO: 3657). In some embodiments, the 7 consecutive amino acids comprise YSTDERK (SEQ ID NO: 3658). In some embodiments, the 7 consecutive amino acids comprise YSTDVRM (SEQ ID NO: 3650).

[1271] In some embodiments, the 3 consecutive amino acids comprise IVM. In some embodiments, the 4 consecutive amino acids comprise IVMN (SEQ ID NO: 3693). In some embodiments, the 5 consecutive amino acids comprise IVMNS (SEQ ID NO: 3694). In some embodiments, the 6 consecutive amino acids comprise IVMNSL (SEQ ID NO: 3695). In some embodiments, the 7 consecutive amino acids comprise IVMNSLK (SEQ ID NO: 3651).

[1272] In some embodiments, the AAV capsid polypeptide, e.g., the AAV capsid variant, comprises an amino acid sequence comprising at least one, two, or three but no more than four modifications, e.g., substitutions (e.g., conservative substitutions), relative to the amino acid sequence of any of SEQ ID NO: 3648-3659. In some embodiments, the modification is a conservative substitution.

[1273] In some embodiments, the AAV capsid polypeptide, e.g., the AAV capsid variant, comprises the amino acid sequence of PLNGAVHLY (SEQ ID NO: 3648), an amino acid sequence comprising at least one, two, or three but no more than four modifications, e.g., substitutions (e.g., conservative substitutions), insertions, or deletions, relative to the amino acid sequence of PLNGAVHLY (SEQ ID NO: 3648), or an amino acid sequence comprising at least one, two, or three but no more than four different amino acids relative to the amino acid sequence of PLNGAVHLY (SEQ ID NO: 3648), optionally wherein position 7 is H.

[1274] In some embodiments, the AAV capsid polypeptide, e.g., the AAV capsid variant, comprises the amino acid sequence of RDSPKGW (SEQ ID NO: 3649), an amino acid sequence comprising at least one, two, or three modifications, e.g., substitutions (e.g., conservative substitutions), insertions, or deletions, but no more than four modifications, e.g., substitutions (e.g., conservative substitutions), insertions, or deletions, relative to the amino acid sequence of RDSPKGW (SEQ ID NO: 3649), or an amino acid sequence comprising at least one, two, or three but no more than four different amino acids relative to the amino acid sequence of RDSPKGW (SEQ ID NO: 3649).

[1275] In some embodiments, the AAV capsid polypeptide, e.g., the AAV capsid variant, comprises the amino acid sequence of IVMNSLK (SEQ ID NO: 3651), an amino acid sequence comprising at least one, two, or three modifications, e.g., substitutions (e.g., conservative substitutions), insertions, or deletions, but no more than four modifications, e.g., substitutions (e.g., conservative substitutions), insertions, or deletions, relative to the amino acid sequence of IVMNSLK (SEQ ID NO: 3651), or an amino acid sequence comprising at least one, two, or three but no more than four different amino acids relative to the amino acid sequence of IVMNSLK (SEQ ID NO: 3651).

[1276] In some embodiments, the AAV capsid polypeptide, e.g., the AAV capsid variant, comprises the amino acid sequence of YSTDVRM (SEQ ID NO: 3650), an amino acid sequence comprising at least one, two, or three modifications, e.g., substitutions (e.g., conservative substitutions), insertions, or deletions, but no more than four modifications, e.g., substitutions (e.g., conservative substitutions), insertions, or deletions, relative to the amino acid sequence of YSTDVRM (SEQ ID NO: 3650), or an amino acid sequence comprising at least one, two, or three but no more than four different amino acids relative to the amino acid sequence of YSTDVRM (SEQ ID NO: 3650).

[1277] In some embodiments, the AAV capsid polypeptide, e.g., the AAV capsid variant, comprises the amino acid sequence of RESPRGL (SEQ ID NO: 3652), a sequence comprising at least one, two, or three modifications, e.g., substitutions (e.g., conservative substitutions), insertions, or deletions, but no more than four modifications, e.g., substitutions (e.g., conservative substitutions), insertions, or deletions, relative to the amino acid sequence of RESPRGL (SEQ ID NO: 3652), or an amino acid sequence comprising at least one, two, or three but no more than four different amino acids relative to the amino acid sequence of RESPRGL (SEQ ID NO: 3652).

[1278] In some embodiments, the AAV capsid variant comprises the amino acid sequence of any of SEQ ID NO: 3648-3659. In some embodiments, the amino acid sequence is present in loop VIII of an AAV capsid variant described herein. In some embodiments, the AAV capsid variant comprises the amino acid sequence of SEQ ID NO: 3648. In some embodiments, the AAV capsid variant comprises the amino acid sequence of SEQ ID NO: 3649. In some embodiments, the AAV capsid variant comprises the amino acid sequence of SEQ ID NO: 3651. In some embodiments, the amino acid sequence is present immediately subsequent to position 586, relative to a reference sequence numbered according to the amino acid sequence of SEQ ID NO: 138. In some embodiments, the amino acid sequence is present immediately subsequent to position 588, relative to a reference sequence numbered according to the amino acid sequence of SEQ ID NO: 138. In some embodiments, the amino acid sequence is present immediately subsequent to position 589, relative to a reference sequence numbered according to the amino acid sequence of SEQ ID NO: 138.

[1279] In some embodiments, the AAV capsid polypeptide, e.g., the AAV capsid variant (e.g., an AAV capsid variant described herein), comprises an amino acid sequence encoded by the nucleotide sequence of any one of SEQ ID NOs: 3660-3671, or a nucleotide sequence substantially identical (e.g., having at least 70%, 75%, 80%, 85%, 90%, 92%, 95%, 97%, 98%, or 99% sequence identity) thereto. In some embodiments, the AAV capsid, e.g., an AAV capsid variant described herein, comprises an amino acid sequence encoded by a nucleotide sequence comprising at least one, two, three, four, five, six, or seven modifications, e.g., substitutions (e.g., conservative substitutions), insertions, or deletions, but no more than ten modifications, e.g., substitutions (e.g., conservative substitutions), insertions, or deletions, relative to the nucleotide sequences of any of SEQ ID NOs: 3660-3671. In some embodiments, the AAV capsid polypeptide, e.g., the AAV capsid variant (e.g., an AAV capsid variant described herein), comprises an amino acid sequence encoded by a nucleotide sequence comprising at least one, two, three, four, five, six, or seven, but no more than ten different nucleotides relative to the nucleotide sequence of any of SEQ ID NOs: 3660-3671.

[1280] In some embodiments, the AAV capsid polypeptide, e.g., the AAV capsid variant (e.g., an AAV capsid variant described herein), comprises an amino acid sequence encoded by the nucleotide sequence of any one of SEQ ID NOs: 3660-3671, or a nucleotide sequence substantially identical (e.g., having at least 70%, 75%, 80%, 85%, 90%, 92%, 95%, 97%, 98%, or 99% sequence identity) thereto. In some embodiments, the AAV capsid, e.g., an AAV capsid variant described herein, comprises an amino acid sequence encoded by a nucleotide sequence comprising at least one, two, three, four, five, six, or seven modifications, e.g., substitutions (e.g., conservative substitutions), insertions, or deletions, but no more than ten modifications, e.g., substitutions (e.g., conservative substitutions), insertions, or deletions, relative to the nucleotide sequences of any of SEQ ID NOs: 3660-3671. In some embodiments, the AAV capsid polypeptide, e.g., the AAV capsid variant (e.g., an AAV capsid variant described herein), comprises an amino acid sequence encoded by a nucleotide sequence comprising at least one, two, three, four, five, six, or seven, but no more than ten different nucleotides relative to the nucleotide sequence of any of SEQ ID NOs: 3660-3671.

[1281] In some embodiments, the nucleotide sequence encoding the AAV capsid polypeptide, e.g., the AAV capsid variant (e.g., an AAV capsid variant described herein), comprises the nucleotide sequence of any one of SEQ ID NOs: 3660-3671, or a nucleotide sequence substantially identical (e.g., having at least 70%, 75%, 80%, 85%, 90%, 92%, 95%, 97%, 98%, or 99% sequence identity) thereto. In some embodiments, nucleic acid sequence encoding the AAV capsid variant, e.g., an AAV capsid variant described herein, comprises a nucleotide sequence comprising at least one, two, three, four, five, six, or seven modifications, e.g., substitutions (e.g., conservative substitutions), insertions, or deletions, but no more than ten modifications, e.g., substitutions (e.g., conservative substitutions), insertions, or deletions, of the nucleotide sequences relative to any of SEQ ID NOs: 3660-3671. In some embodiments, the nucleotide sequence encoding the AAV capsid polypeptide, e.g., the AAV capsid variant (e.g., an AAV capsid variant described herein), comprises a nucleotide sequence comprising at least one, two, three, four, five, six, or seven, but no more than ten different nucleotides relative to the nucleotide sequence of any of SEQ ID NOs: 3660-3671.

[1282] In some embodiments, the nucleotide sequence encoding the AAV capsid polypeptide, e.g., the AAV capsid variant (e.g., an AAV capsid variant described herein), comprises the nucleotide sequence of SEQ ID NO: 3660, or a nucleotide sequence substantially identical (e.g., having at least 70%, 75%, 80%, 85%, 90%, 92%, 95%, 97%, 98%, or 99% sequence identity) thereto. In some embodiments, the nucleic acid sequence encoding the AAV capsid variant comprises a nucleotide sequence comprising at least one, two, three, four, five, six, or seven modifications, e.g., substitutions (e.g., conservative substitutions), insertions, or deletions, but no more than ten modifications, e.g., substitutions (e.g., conservative substitutions), insertions, or deletions, relative to the nucleotide sequences of SEQ ID NO: 3660. In some embodiments, the nucleotide sequence encoding the AAV capsid polypeptide, e.g., the AAV capsid variant (e.g., an AAV capsid variant described herein), comprises a nucleotide sequence comprising at least one, two, three, four, five, six, or seven, but no more than ten different nucleotides relative to the nucleotide sequence of SEQ ID NO: 3660.

[1283] In some embodiments, the nucleotide sequence encoding the AAV capsid polypeptide, e.g., the AAV capsid variant (e.g., an AAV capsid variant described herein), comprises the nucleotide sequence of SEQ ID NO: 3663, or a nucleotide sequence substantially identical (e.g., having at least 70%, 75%, 80%, 85%, 90%, 92%, 95%, 97%, 98%, or 99% sequence identity) thereto. In some embodiments, the nucleic acid sequence encoding the AAV capsid variant comprises a nucleotide sequence comprising at least one, two, three, four, five, six, or seven modifications, e.g., substitutions (e.g., conservative substitutions), insertions, or deletions, but no more than ten modifications, e.g., substitutions (e.g., conservative substitutions), insertions, or deletions, of the nucleotide sequences relative to SEQ ID NO: 3663. In some embodiments, the nucleotide sequence encoding the AAV capsid polypeptide, e.g., the AAV capsid variant (e.g., an AAV capsid variant described herein), comprises a nucleotide sequence comprising at least one, two, three, four, five, six, or seven, but no more than ten different nucleotides relative to the nucleotide sequence of SEQ ID NO: 3663.

[1284] In some embodiments, the AAV capsid polypeptide, e.g., the AAV capsid variant, comprises an amino acid residue other than “A” at position 587 and/or an amino acid residue other than “Q” at position 588, numbered according to SEQ ID NO: 138. In some embodiments, the AAV capsid polypeptide, e.g., the AAV capsid variant, comprises one, two, three, or all of an amino acid other than A at position 589, an amino acid other than Q at position 590, an amino acid other than A at position 591, and/or an amino acid other than Q at position 592, relative to a reference sequence numbered according to the amino acid sequence of SEQ ID NO: 138. In some embodiments, the AAV capsid polypeptide, e.g., the AAV capsid variant, comprises one, two, or all of an amino acid other than T at position 593, an amino acid other than G at position 594, and/or an amino acid other than W at position 595, relative to a reference sequence numbered according to the amino acid sequence of SEQ ID NO: 138. In some embodiments, the AAV capsid polypeptide, e.g., the AAV capsid variant, comprises one, two, or all of an amino acid other than V at position 596, an amino acid other than Q at position 597, and/or an amino acid other than N at position 598, relative to a reference sequence numbered according to the amino acid sequence of SEQ ID NO: 138.

[1285] In some embodiments, the AAV capsid polypeptide, e.g., the AAV capsid variant, comprises the amino acid sequence of PLNGAVHLY (SEQ ID NO: 3648) wherein the amino acid sequence of PLNGAVHLY (SEQ ID NO: 3648) is present immediately subsequent to position 586, relative to a reference sequence numbered according to the amino acid sequence of SEQ ID NO: 138.

[1286] In some embodiments, the polypeptide, e.g., the AAV capsid variant, comprises the amino acid sequence of GGTLAVVSL (SEQ ID NO: 3654), wherein the amino acid sequence of GGTLAVVSL (SEQ ID NO: 3654) is present immediately subsequent to position 586, relative to a reference sequence numbered according to the amino acid sequence of SEQ ID NO: 138.

[1287] In some embodiments, the AAV capsid polypeptide, e.g., the AAV capsid variant, comprises the amino acid sequence of IVMNSLK (SEQ ID NO: 3651), wherein the amino acid sequence of IVMNSLK (SEQ ID NO: 3651) is present immediately subsequent to position 588, relative to a reference sequence numbered according to the amino acid sequence of SEQ ID NO: 138.

[1288] In some embodiments, the AAV capsid polypeptide, e.g., the AAV capsid variant, comprises the amino acid sequence of any of SEQ ID NOs: 3649, 3650, 3652, 3653, or 3655-3659, wherein the amino acid sequence of any of the aforesaid sequences is present immediately subsequent to position 589, relative to a reference sequence numbered according to the amino acid sequence of SEQ ID NO: 138.

[1289] In some embodiments, the AAV capsid polypeptide, e.g., the AAV capsid variant, further comprises a substitution at position K449, e.g., a K449R substitution, numbered according to SEQ ID NO: 138. In some embodiments, the AAV capsid variant further comprises a modification, e.g., an insertion, substitution, and/or deletion in loop I, II, IV, and/or VI.

[1290] In some embodiments, the AAV capsid polypeptide, e.g., the AAV capsid variant, comprises one, two, three, or all of an amino acid other than A at position 589, an amino acid other than Q at position 590, an amino acid other than A at position 591, and/or an amino acid other than Q at position 592, relative to a reference sequence numbered according to the amino acid sequence of SEQ ID NO: 138. In some embodiments, the AAV capsid polypeptide, e.g., the AAV capsid variant, comprises one, two, or all of an amino acid other than T at position 593, an amino acid other than G at position 594, and/or an amino acid other than W at position 595, relative to a reference sequence numbered according to the amino acid sequence of SEQ ID NO: 138. In some embodiments, the AAV capsid polypeptide, e.g., the AAV capsid variant, comprises one, two, or all of an amino acid other than V at position 596, an amino acid other than Q at position 597, and/or an amino acid other than N at position 598, relative to a reference sequence numbered according to the amino acid sequence of SEQ ID NO: 138. In some embodiments, the AAV capsid variant further comprises the amino acid sequence of SEQ ID NO: 138, or an amino acid sequence with at least 80% (e.g., at least about 85, 90, 95, 96, 97, 98, or 99%) sequence identity thereto. In some embodiments, the AAV capsid variant further comprises an amino acid sequence encoded by the nucleotide sequence of SEQ ID NO: 137, or a sequence with at least 80% (e.g., at least about 85, 90, 95, 96, 97, 98, or 99%) sequence identity thereto.

[1291] In some embodiments, an AAV capsid polypeptide, e.g., the AAV capsid variant, comprises immediately subsequent to position 586, 588, or 589, numbered relative to SEQ ID NO: 138 or corresponding to equivalent positions in any other AAV serotype (e.g., AAV1, AAV2, AAV3, AAV3b, AAV4, AAV5, AAV6, AAV7, AAV8, AAVrh8, AAVrh10, AAVrh32.33, AAVrh74, SEQ ID NO: 1, SEQ ID NO: 11, PHP.N, PHP.B, or an AAV serotype as provided in Table 6 of WO 2021/230987 (the contents of which are hereby incorporated by reference in their entirety)), at least 3, 4, 5, 6, 7, 8, 9, 10, 11, 12, 13, 14, 15, 16, 17, 18, or 19 consecutive amino acids of any of amino acid sequence provided in Tables 2, 20, 23, or 24. In some embodiments, the at least 3, 4, 5, 6, 7, 8, 9, 10, 11, 12, 13, 14, 15, 16, 17, 18, or 19 consecutive amino acids of any of amino acid sequence provided in Tables 2, 20, 23, or 24 replaces at least one, two, three, four, five, six, seven, eight, nine, ten, elven, or all of positions A587, Q588, A589, Q590, A591, Q592, T593, G594, W595, V596, Q597, and/or N598, numbered according to SEQ ID NO: 138 or corresponding to equivalent positions in any other AAV serotype (e.g., AAV1, AAV2, AAV3, AAV3b, AAV4, AAV5, AAV6, AAV7, AAV8, AAVrh8, AAVrh10, AAVrh32.33, AAVrh74, SEQ ID NO: 1, SEQ ID NO: 11, PHP.N, PHP.B, or an AAV serotype as provided in Table 6 of WO 2021/230987 (the contents of which are hereby incorporated by reference in their entirety). In some embodiments, the at least 3, 4, 5, 6, 7, 8, 9, 10, 11, 12, 13, 14, 15, 16, 17, 18, or 19 consecutive amino acids of any of amino acid sequence provided in Tables 2, 20, 23, or 24 replaces positions A587, Q588, or both positions A587 and Q588, numbered according to SEQ ID NO: 138 or corresponding to equivalent positions in any other AAV serotype (e.g., AAV1, AAV2, AAV3, AAV3b, AAV4, AAV5, AAV6, AAV7, AAV8, AAVrh8, AAVrh10, AAVrh32.33, AAVrh74, SEQ ID NO: 1, SEQ ID NO: 11, PHP.N, PHP.B, or an AAV serotype as provided in Table 6 of WO 2021/230987 (the contents of which are hereby incorporated by reference in their entirety). In some embodiments, the AAV capsid variant comprises an amino acid other than the wild-type, e.g., native, amino acid, at one, two, three, four, five, six, seven, eight, nine, ten, eleven or all of positions A587, Q588, A589, Q590, A591, Q592, T593, G594, W595, V596, Q597, and/or N598, numbered according to SEQ ID NO: 138 or corresponding to equivalent positions in any other AAV serotype (e.g., AAV1, AAV2, AAV3, AAV3b, AAV4, AAV5, AAV6, AAV7, AAV8, AAVrh8, AAVrh10, AAVrh32.33, AAVrh74, SEQ ID NO: 1, SEQ ID NO: 11, PHP.N, PHP.B, or an AAV serotype as provided in Table 6 of WO 2021/230987 (the contents of which are hereby incorporated by reference in their entirety). In some embodiments, the AAV capsid variant comprises an amino acid other than the wild-type, e.g., native, amino acid, at position A587, Q588, or both positions A587 and Q588, numbered according to SEQ ID NO: 138 or corresponding to equivalent positions in any other AAV serotype (e.g., AAV1, AAV2, AAV3, AAV3b, AAV4, AAV5, AAV6, AAV7, AAV8, AAVrh8, AAVrh10, AAVrh32.33, AAVrh74, SEQ ID NO: 1, SEQ ID NO: 11, PHP.N, PHP.B, or an AAV serotype as provided in Table 6 of WO 2021/230987 (the contents of which are hereby incorporated by reference in their entirety)). In some embodiments, the AAV capsid variant comprises a modification, e.g., substitution, at one, two, three, four, five, six, seven, eight, nine, ten eleven or all of positions A587, Q588, A589, Q590, A591, Q592, T593, G594, W595, V596, Q597, and/or N598, numbered according to SEQ ID NO: 138 or corresponding to equivalent positions in any other AAV serotype (e.g., AAV1, AAV2, AAV3, AAV3b, AAV4, AAV5, AAV6, AAV7, AAV8, AAVrh8, AAVrh10, AAVrh32.33, AAVrh74, SEQ ID NO: 1, SEQ ID NO: 11, PHP.N, PHP.B, or an AAV serotype as provided in Table 6 of WO 2021/230987 (the contents of which are hereby incorporated by reference in their entirety). In some embodiments, the AAV capsid variant comprises a modification, e.g., substitution, at position A587, Q588, or both positions A587 and Q588, numbered according to SEQ ID NO: 138 or corresponding to equivalent positions in any other AAV serotype (e.g., AAV1, AAV2, AAV3, AAV3b, AAV4, AAV5, AAV6, AAV7, AAV8, AAVrh8, AAVrh10, AAVrh32.33, AAVrh74, SEQ ID NO: 1, SEQ ID NO: 11, PHP.N, PHP.B, or an AAV serotype as provided in Table 6 of WO 2021/230987 (the contents of which are hereby incorporated by reference in their entirety).

[1292] In some embodiments, an AAV capsid polypeptide, e.g., an AAV capsid variant, of the present disclosure comprises an amino acid sequence as described herein, e.g. an amino acid sequence of an AAV capsid variant chosen from TTD-001, TTD-002, TTD-003, TTD-004, TTD-005, TTD-006, TTD-007, TTD-008, TTD-009, TTD-010, TTD-011, or TTD-012, e.g., as described in Tables 3 and 4.

[1293] In some embodiments, an AAV capsid polypeptide, e.g. the AAV capsid variant, comprises a VP1, VP2, and/or VP3 protein comprising an amino acid sequence described herein, e.g. an amino acid sequence of an AAV capsid variant chosen from TTD-001, TTD-002, TTD-003, TTD-004, TTD-005, TTD-006, TTD-007, TTD-008, TTD-009, TTD-010, TTD-011, or TTD-012, e.g., as described in Tables 3 and 4.

[1294] In some embodiments, an AAV capsid polypeptide, e.g., the AAV capsid variant, comprises an amino acid sequence encoded by a nucleotide sequence as described herein, e.g. a nucleotide sequence of an AAV capsid variant chosen from TTD-001, TTD-002, TTD-003, TTD-004, TTD-005, TTD-006, TTD-007, TTD-008, TTD-009, TTD-010, TTD-011, or TTD-012, e.g., as described in Tables 3 and 5.

[1295] In some embodiments, a polynucleotide encoding an AAV capsid polypeptide, e.g., an AAV capsid variant, of the present disclosure comprises a nucleotide sequence described herein, e.g. a nucleotide sequence of an AAV capsid variant chosen from TTD-001, TTD-002, TTD-003, TTD-004, TTD-005, TTD-006, TTD-007, TTD-008, TTD-009, TTD-010, TTD-011, or TTD-012, e.g., as described in Tables 3 and 5.

[1296] In some embodiments, insertion of a nucleic acid sequence, targeting nucleic acid sequence, or a peptide into a parent AAV sequence generates the non-limiting exemplary full length capsid sequences, e.g., an AAV capsid polypeptide, e.g., an AAV capsid variant, as described in Tables 3-5.

TABLE 3
Exemplary full length capsid sequences (VP1 with insert)

| | VP1 DNA | VP1 PRT | Peptide PRT | Peptide DNA |
|---|---|---|---|---|
| Serotype | SEQ ID NO: | SEQ ID NO: | SEQ ID NO: | SEQ ID NO: |
| TTD-001 | 3623 | 3636 | 3648 | 3660 |
| TTD-002 | 3624 or 3625 | 3637 | 3649 | 3661 |
| TTD-003 | 3626 | 3638 | 3650 | 3662 |
| TTD-004 | 3627 | 3639 | 3651 | 3663 |
| TTD-005 | 3628 | 3640 | 3652 | 3664 |
| TTD-006 | 3629 | 3641 | 3653 | 3665 |
| TTD-007 | 3630 | 3642 | 3654 | 3666 |
| TTD-008 | 3631 | 3643 | 3655 | 3667 |
| TTD-009 | 3632 | 3644 | 3656 | 3668 |
| TTD-010 | 3633 | 3645 | 3657 | 3669 |
| TTD-011 | 3634 | 3646 | 3658 | 3670 |
| TTD-012 | 3635 | 3647 | 3659 | 3671 |
| TTD-013 | 4 | 5 | 314 | 6 |
| TTD-014 | 7 | 8 | 566 | 9 |

TABLE 4
Exemplary full length capsid amino acid sequences

| | SEQ | |
|---|---|---|
| Name and | ID | |
| Annotation | NO: | Amino Acid Sequence |
| TTD-001 | 3636 | MAADGYLPDWLEDNLSEGIREWWALKPGAPQPKANQQHQDNARGLVLP |
| 9mer peptide | | GYKYLGPGNGLDKGEPVNAADAAALEHDKAYDQQLKAGDNPYLKYNHA |
| underlined, starts | | DAEFQERLKEDISFGGNLGRAVFQAKKRLLEPLGLVEEAAKTAPGKKR |
| at position 587 | | PVEQSPQEPDSSAGIGKSGAQPAKKRLNFGQTGDTESVPDPQPIGEPP |
| (immediately | | AAPSGVGSLTMASGGGAPVADNNEGADGVGSSSGNWHCDSQWLGDRVI |
| subsequent to | | ITSTRTWALPTYNNHLYKQISNSTSGGSSNDNAYFGYSTPWGYFDENR |
| position 586); | | FHCHFSPRDWQRLINNNWGFRPKRLNFKLFNIQVKEVTDNNGVKTIAN |
| 743 aa | | NLTSTVQVFTDSDYQLPYVLGSAHEGCLPPFPADVFMIPQYGYLTLND |
| | | GSQAVGRSSFYCLEYFPSQMLRIGNNFQFSYEFENVPFHSSYAHSQSL |
| | | DRLMNPLIDQYLYYLSKTINGSGQNQQTLKFSVAGPSNMAVQGRNYIP |
| | | GPSYRQQRVSTTVTQNNNSEFAWPGASSWALNGRNSLMNPGPAMASHK |
| | | EGEDRFFPLSGSLIFGKQGTGRDNVDADKVMITNEEEIKTINPVATES |
| | | YGQVATNHQSPLNGAVHLYAQAQTGWVQNQGILPGMVWQDRDVYLQGP |
| | | IWAKIPHIDGNFHPSPLMGGFGMKHPPPQILIKNTPVPADPPTAFNKD |
| | | KLNSFITQYSTGQVSVEIEWELQKENSKRWNPEIQYTSNYYKSNNVEF |
| | | AVNTEGVYSEPRPIGTRYLTRNL |
| TTD-002 | 3637 | MAADGYLPDWLEDNLSEGIREWWALKPGAPQPKANQQHQDNARGLVLP |
| 7mer peptide | | GYKYLGPGNGLDKGEPVNAADAAALEHDKAYDQQLKAGDNPYLKYNHA |
| underlined, starts | | DAEFQERLKEDTSFGGNLGRAVFQAKKRLLEPLGLVEEAAKTAPGKKR |
| at position 590 | | PVEQSPQEPDSSAGIGKSGAQPAKKRLNFGQTGDTESVPDPQPIGEPP |
| (immediately | | AAPSGVGSLTMASGGGAPVADNNEGADGVGSSSGNWHCDSQWLGDRVI |
| subsequent to | | TTSTRTWALPTYNNHLYKQISNSTSGGSSNDNAYFGYSTPWGYFDENR |
| position 589); | | FHCHFSPRDWQRLINNNWGFRPKRLNFKLFNIQVKEVTDNNGVKTIAN |
| 743 aa | | NLTSTVQVFTDSDYQLPYVLGSAHEGCLPPFPADVFMIPQYGYLILND |
| | | GSQAVGRSSFYCLEYFPSQMLRTGNNFQFSYEFENVPFHSSYAHSQSL |
| | | DRLMNPLIDQYLYYLSKTINGSGQNQQTLKFSVAGPSNMAVQGRNYIP |
| | | GPSYRQQRVSTTVTQNNNSEFAWPGASSWALNGRNSLMNPGPAMASHK |
| | | EGEDRFFPLSGSLIFGKQGTGRDNVDADKVMITNEEEIKTTNPVATES |
| | | YGQVATNHQSAQARDSPKGWQAQTGWVQNQGILPGMVWQDRDVYLQGP |
| | | IWAKIPHTDGNFHPSPLMGGFGMKHPPPQILIKNTPVPADPPTAFNKD |
| | | KLNSFITQYSTGQVSVEIEWELQKENSKRWNPEIQYTSNYYKSNNVEF |
| | | AVNTEGVYSEPRPIGTRYLTRNL |
| TTD-003 | 3638 | MAADGYLPDWLEDNLSEGIREWWALKPGAPQPKANQQHQDNARGLVLP |
| 7mer peptide | | GYKYLGPGNGLDKGEPVNAADAAALEHDKAYDQQLKAGDNPYLKYNHA |
| underlined, starts | | DAEFQERLKEDTSFGGNLGRAVFQAKKRLLEPLGLVEEAAKTAPGKKR |
| at position 590 | | PVEQSPQEPDSSAGIGKSGAQPAKKRLNFGQTGDTESVPDPQPIGEPP |
| (immediately | | AAPSGVGSLTMASGGGAPVADNNEGADGVGSSSGNWHCDSQWLGDRVI |
| subsequent to | | TTSTRTWALPTYNNHLYKQISNSTSGGSSNDNAYFGYSTPWGYFDFNR |
| position 589); | | FHCHFSPRDWQRLINNNWGFRPKRLNFKLFNIQVKEVTDNNGVKTIAN |
| 743 aa | | NLTSTVQVFTDSDYQLPYVLGSAHEGCLPPFPADVFMIPQYGYLTLND |
| | | GSQAVGRSSFYCLEYFPSQMLRTGNNFQFSYEFENVPFHSSYAHSQSL |
| | | DRLMNPLIDQYLYYLSKTINGSGQNQQTLKFSVAGPSNMAVQGRNYIP |
| | | GPSYRQQRVSTTVTQNNNSEFAWPGASSWALNGRNSLMNPGPAMASHK |
| | | EGEDRFFPLSGSLIFGKQGTGRDNVDADKVMITNEEEIKTINPVATES |
| | | YGQVATNHQSAQAYSTDVRMQAQTGWVQNQGILPGMVWQDRDVYLQGP |
| | | IWAKIPHTDGNFHPSPLMGGFGMKHPPPQILIKNTPVPADPPTAFNKD |
| | | KLNSFITQYSTGQVSVEIEWELQKENSKRWNPEIQYTSNYYKSNNVEF |
| | | AVNTEGVYSEPRPIGTRYLIRNL |
| TTD-004 | 3639 | MAADGYLPDWLEDNLSEGIREWWALKPGAPQPKANQQHQDNARGLVLP |
| 7mer peptide | | GYKYLGPGNGLDKGEPVNAADAAALEHDKAYDQQLKAGDNPYLKYNHA |
| underlined, starts | | DAEFQERLKEDTSFGGNLGRAVFQAKKRLLEPLGLVEEAAKTAPGKKR |
| at position 589 | | PVEQSPQEPDSSAGIGKSGAQPAKKRLNFGQTGDTESVPDPQPIGEPP |
| (immediately | | AAPSGVGSLTMASGGGAPVADNNEGADGVGSSSGNWHCDSQWLGDRVI |
| subsequent to | | TTSTRTWALPTYNNHLYKQISNSTSGGSSNDNAYFGYSTPWGYFDFNR |
| position 588); | | FHCHFSPRDWQRLINNNWGFRPKRLNFKLFNIQVKEVIDNNGVKTIAN |
| 743 aa | | NLTSTVQVFTDSDYQLPYVLGSAHEGCLPPFPADVFMIPQYGYLTLND |
| | | GSQAVGRSSFYCLEYFPSQMLRIGNNFQFSYEFENVPFHSSYAHSQSL |
| | | DRLMNPLIDQYLYYLSKTINGSGQNQQTLKFSVAGPSNMAVQGRNYIP |
| | | GPSYRQQRVSTTVTQNNNSEFAWPGASSWALNGRNSLMNPGPAMASHK |
| | | EGEDRFFPLSGSLIFGKQGTGRDNVDADKVMITNEEEIKTINPVATES |
| | | YGQVATNHQSAQIVMNSLKAQAQTGWVQNQGILPGMVWQDRDVYLQGP |
| | | IWAKIPHTDGNFHPSPLMGGFGMKHPPPQILIKNTPVPADPPTAFNKD |
| | | KLNSFITQYSTGQVSVEIEWELQKENSKRWNPEIQYTSNYYKSNNVEF |
| | | AVNTEGVYSEPRPIGTRYLTRNL |
| TTD-005 | 3640 | MAADGYLPDWLEDNLSEGIREWWALKPGAPQPKANQQHQDNARGLVLP |
| 7mer peptide | | GYKYLGPGNGLDKGEPVNAADAAALEHDKAYDQQLKAGDNPYLKYNHA |
| underlined, starts | | DAEFQERLKEDTSFGGNLGRAVFQAKKRLLEPLGLVEEAAKTAPGKKR |
| at position 590 | | PVEQSPQEPDSSAGIGKSGAQPAKKRLNFGQTGDTESVPDPQPIGEPP |
| (immediately | | AAPSGVGSLTMASGGGAPVADNNEGADGVGSSSGNWHCDSQWLGDRVI |
| subsequent to | | TTSTRTWALPTYNNHLYKQISNSTSGGSSNDNAYFGYSTPWGYFDFNR |
| position 589); | | FHCHFSPRDWQRLINNNWGFRPKRLNFKLFNIQVKEVTDNNGVKTIAN |
| 743 aa | | NLTSTVQVFTDSDYQLPYVLGSAHEGCLPPFPADVFMIPQYGYLTLND |
| | | GSQAVGRSSFYCLEYFPSQMLRTGNNFQFSYEFENVPFHSSYAHSQSL |
| | | DRLMNPLIDQYLYYLSKTINGSGQNQQTLKFSVAGPSNMAVQGRNYIP |
| | | GPSYRQQRVSTTVTQNNNSEFAWPGASSWALNGRNSLMNPGPAMASHK |
| | | EGEDRFFPLSGSLIFGKQGTGRDNVDADKVMITNEEEIKTTNPVATES |
| | | YGQVATNHQSAQARESPRGLQAQTGWVQNQGILPGMVWQDRDVYLQGP |
| | | IWAKIPHTDGNFHPSPLMGGFGMKHPPPQILIKNTPVPADPPTAFNKD |
| | | KLNSFITQYSTGQVSVEIEWELQKENSKRWNPEIQYTSNYYKSNNVEF |
| | | AVNTEGVYSEPRPIGTRYLTRNL |
| TTD-006 | 3641 | MAADGYLPDWLEDNLSEGIREWWALKPGAPQPKANQQHQDNARGLVLP |
| 7mer peptide | | GYKYLGPGNGLDKGEPVNAADAAALEHDKAYDQQLKAGDNPYLKYNHA |
| underlined, starts | | DAEFQERLKEDTSFGGNLGRAVFQAKKRLLEPLGLVEEAAKTAPGKKR |
| at position 590 | | PVEQSPQEPDSSAGIGKSGAQPAKKRLNFGQTGDTESVPDPQPIGEPP |
| (immediately | | AAPSGVGSLIMASGGGAPVADNNEGADGVGSSSGNWHCDSQWLGDRVI |
| subsequent to | | TTSTRTWALPTYNNHLYKQISNSTSGGSSNDNAYFGYSTPWGYFDFNR |
| 589); 743 aa | | FHCHFSPRDWQRLINNNWGFRPKRLNFKLFNIQVKEVTDNNGVKTIAN |
| | | NLTSTVQVFTDSDYQLPYVLGSAHEGCLPPFPADVFMIPQYGYLTLND |
| | | GSQAVGRSSFYCLEYFPSQMLRTGNNFQFSYEFENVPFHSSYAHSQSL |
| | | DRLMNPLIDQYLYYLSKTINGSGQNQQTLKFSVAGPSNMAVQGRNYIP |
| | | GPSYRQQRVSTTVTQNNNSEFAWPGASSWALNGRNSLMNPGPAMASHK |
| | | EGEDRFFPLSGSLIFGKQGTGRDNVDADKVMITNEEEIKTTNPVATES |
| | | YGQVATNHQSAQASFNDTRAQAQTGWVQNQGILPGMVWQDRDVYLQGP |
| | | IWAKIPHTDGNFHPSPLMGGFGMKHPPPQILIKNTPVPADPPTAFNKD |
| | | KLNSFITQYSTGQVSVEIEWELQKENSKRWNPEIQYTSNYYKSNNVEF |
| | | AVNTEGVYSEPRPIGTRYLTRNL |
| TTD-007 | 3642 | MAADGYLPDWLEDNLSEGIREWWALKPGAPQPKANQQHQDNARGLVLP |
| 9mer peptide | | GYKYLGPGNGLDKGEPVNAADAAALEHDKAYDQQLKAGDNPYLKYNHA |
| underlined, starts | | DAEFQERLKEDTSFGGNLGRAVFQAKKRLLEPLGLVEEAAKTAPGKKR |
| at position 587 | | PVEQSPQEPDSSAGIGKSGAQPAKKRLNFGQTGDTESVPDPQPIGEPP |
| (immediately | | AAPSGVGSLTMASGGGAPVADNNEGADGVGSSSGNWHCDSQWLGDRVI |
| subsequent to | | TTSTRTWALPTYNNHLYKQISNSTSGGSSNDNAYFGYSTPWGYFDENR |
| position 586); | | FHCHFSPRDWQRLINNNWGFRPKRLNFKLFNIQVKEVTDNNGVKTIAN |
| 743 aa | | NLTSTVQVFTDSDYQLPYVLGSAHEGCLPPFPADVFMIPQYGYLILND |
| | | GSQAVGRSSFYCLEYFPSQMLRTGNNFQFSYEFENVPFHSSYAHSQSL |
| | | DRLMNPLIDQYLYYLSKTINGSGQNQQTLKFSVAGPSNMAVQGRNYIP |
| | | GPSYRQQRVSTTVTQNNNSEFAWPGASSWALNGRNSLMNPGPAMASHK |
| | | EGEDRFFPLSGSLIFGKQGTGRDNVDADKVMITNEEEIKTTNPVATES |
| | | YGQVATNHQSGGTLAVVSLAQAQTGWVQNQGILPGMVWQDRDVYLQGP |
| | | IWAKIPHTDGNFHPSPLMGGFGMKHPPPQILIKNTPVPADPPTAFNKD |
| | | KLNSFITQYSTGQVSVEIEWELQKENSKRWNPEIQYTSNYYKSNNVEF |
| | | AVNTEGVYSEPRPIGTRYLIRNL |
| TTD-008 | 3643 | MAADGYLPDWLEDNLSEGIREWWALKPGAPQPKANQQHQDNARGLVLP |
| 7mer peptide | | GYKYLGPGNGLDKGEPVNAADAAALEHDKAYDQQLKAGDNPYLKYNHA |
| underlined, starts | | DAEFQERLKEDTSFGGNLGRAVFQAKKRLLEPLGLVEEAAKTAPGKKR |
| at position 590 | | PVEQSPQEPDSSAGIGKSGAQPAKKRLNFGQTGDTESVPDPQPIGEPP |
| (immediately | | AAPSGVGSLTMASGGGAPVADNNEGADGVGSSSGNWHCDSQWLGDRVI |
| subsequent to | | TTSTRTWALPTYNNHLYKQISNSTSGGSSNDNAYFGYSTPWGYFDFNR |
| 589); 743 aa | | FHCHFSPRDWQRLINNNWGFRPKRLNFKLFNIQVKEVTDNNGVKTIAN |
| | | NLTSTVQVFTDSDYQLPYVLGSAHEGCLPPFPADVFMIPQYGYLTLND |
| | | GSQAVGRSSFYCLEYFPSQMLRTGNNFQFSYEFENVPFHSSYAHSQSL |
| | | DRLMNPLIDQYLYYLSKTINGSGQNQQTLKFSVAGPSNMAVQGRNYIP |
| | | GPSYRQQRVSTTVTQNNNSEFAWPGASSWALNGRNSLMNPGPAMASHK |
| | | EGEDRFFPLSGSLIFGKQGTGRDNVDADKVMITNEEEIKTTNPVATES |
| | | YGQVATNHQSAQAYGLPKGPQAQTGWVQNQGILPGMVWQDRDVYLQGP |
| | | IWAKIPHTDGNFHPSPLMGGFGMKHPPPQILIKNTPVPADPPTAFNKD |
| | | KLNSFITQYSTGQVSVEIEWELQKENSKRWNPEIQYTSNYYKSNNVEF |
| | | AVNTEGVYSEPRPIGTRYLTRNL |
| TTD-009 | 3644 | MAADGYLPDWLEDNLSEGIREWWALKPGAPQPKANQQHQDNARGLVLP |
| 7mer peptide | | GYKYLGPGNGLDKGEPVNAADAAALEHDKAYDQQLKAGDNPYLKYNHA |
| underlined, starts | | DAEFQERLKEDTSFGGNLGRAVFQAKKRLLEPLGLVEEAAKTAPGKKR |
| at position 590 | | PVEQSPQEPDSSAGIGKSGAQPAKKRLNFGQTGDTESVPDPQPIGEPP |
| (immediately | | AAPSGVGSLTMASGGGAPVADNNEGADGVGSSSGNWHCDSQWLGDRVI |
| subsequent to | | TTSTRTWALPTYNNHLYKQISNSTSGGSSNDNAYFGYSTPWGYFDFNR |
| 589); 743 aa | | FHCHFSPRDWQRLINNNWGFRPKRLNFKLFNIQVKEVTDNNGVKTIAN |
| | | NLTSTVQVFTDSDYQLPYVLGSAHEGCLPPFPADVFMIPQYGYLTLND |
| | | GSQAVGRSSFYCLEYFPSQMLRTGNNFQFSYEFENVPFHSSYAHSQSL |
| | | DRLMNPLIDQYLYYLSKTINGSGQNQQTLKFSVAGPSNMAVQGRNYIP |
| | | GPSYRQQRVSTTVTQNNNSEFAWPGASSWALNGRNSLMNPGPAMASHK |
| | | EGEDRFFPLSGSLIFGKQGTGRDNVDADKVMITNEEEIKITNPVATES |
| | | YGQVATNHQSAQASTGTLRLQAQTGWVQNQGILPGMVWQDRDVYLQGP |
| | | IWAKIPHTDGNFHPSPLMGGFGMKHPPPQILIKNTPVPADPPTAFNKD |
| | | KLNSFITQYSTGQVSVEIEWELQKENSKRWNPEIQYTSNYYKSNNVEF |
| | | AVNTEGVYSEPRPIGTRYLIRNL |
| TTD-010 | 3645 | MAADGYLPDWLEDNLSEGIREWWALKPGAPQPKANQQHQDNARGLVLP |
| 7mer peptide | | GYKYLGPGNGLDKGEPVNAADAAALEHDKAYDQQLKAGDNPYLKYNHA |
| underlined, starts | | DAEFQERLKEDTSFGGNLGRAVFQAKKRLLEPLGLVEEAAKTAPGKKR |
| at position 590 | | PVEQSPQEPDSSAGIGKSGAQPAKKRLNFGQTGDTESVPDPQPIGEPP |
| (immediately | | AAPSGVGSLTMASGGGAPVADNNEGADGVGSSSGNWHCDSQWLGDRVI |
| subsequent to | | TTSTRTWALPTYNNHLYKQISNSTSGGSSNDNAYFGYSTPWGYFDENR |
| 589); 743 aa | | FHCHFSPRDWQRLINNNWGFRPKRLNFKLFNIQVKEVTDNNGVKTIAN |
| | | NLTSTVQVFTDSDYQLPYVLGSAHEGCLPPFPADVFMIPQYGYLTLND |
| | | GSQAVGRSSFYCLEYFPSQMLRTGNNFQFSYEFENVPFHSSYAHSQSL |
| | | DRLMNPLIDQYLYYLSKTINGSGQNQQTLKFSVAGPSNMAVQGRNYIP |
| | | GPSYRQQRVSTTVTQNNNSEFAWPGASSWALNGRNSLMNPGPAMASHK |
| | | EGEDRFFPLSGSLIFGKQGTGRDNVDADKVMITNEEEIKTTNPVATES |
| | | YGQVATNHQSAQAYSTDERMQAQTGWVQNQGILPGMVWQDRDVYLQGP |
| | | IWAKIPHTDGNFHPSPLMGGFGMKHPPPQILIKNTPVPADPPTAFNKD |
| | | KLNSFITQYSTGQVSVEIEWELQKENSKRWNPEIQYTSNYYKSNNVEF |
| | | AVNTEGVYSEPRPIGTRYLTRNL |
| TTD-011 | 3646 | MAADGYLPDWLEDNLSEGIREWWALKPGAPQPKANQQHQDNARGLVLP |
| 7mer peptide | | GYKYLGPGNGLDKGEPVNAADAAALEHDKAYDQQLKAGDNPYLKYNHA |
| underlined, starts | | DAEFQERLKEDTSFGGNLGRAVFQAKKRLLEPLGLVEEAAKTAPGKKR |
| at position 590 | | PVEQSPQEPDSSAGIGKSGAQPAKKRLNFGQTGDTESVPDPQPIGEPP |
| (immediately | | AAPSGVGSLTMASGGGAPVADNNEGADGVGSSSGNWHCDSQWLGDRVI |
| subsequent to | | TTSTRTWALPTYNNHLYKQISNSTSGGSSNDNAYFGYSTPWGYFDFNR |
| 589); 743 aa | | FHCHFSPRDWQRLINNNWGFRPKRLNFKLFNIQVKEVTDNNGVKTIAN |
| | | NLTSTVQVFTDSDYQLPYVLGSAHEGCLPPFPADVFMIPQYGYLTLND |
| | | GSQAVGRSSFYCLEYFPSQMLRTGNNFQFSYEFENVPFHSSYAHSQSL |
| | | DRLMNPLIDQYLYYLSKTINGSGQNQQTLKFSVAGPSNMAVQGRNYIP |
| | | GPSYRQQRVSTTVTQNNNSEFAWPGASSWALNGRNSLMNPGPAMASHK |
| | | EGEDRFFPLSGSLIFGKQGTGRDNVDADKVMITNEEEIKTTNPVATES |
| | | YGQVATNHQSAQAYSTDERKQAQTGWVQNQGILPGMVWQDRDVYLQGP |
| | | IWAKIPHTDGNFHPSPLMGGFGMKHPPPQILIKNTPVPADPPTAFNKD |
| | | KLNSFITQYSTGQVSVEIEWELQKENSKRWNPEIQYTSNYYKSNNVEF |
| | | AVNTEGVYSEPRPIGTRYLTRNL |
| TTD-012 | 3647 | MAADGYLPDWLEDNLSEGIREWWALKPGAPQPKANQQHQDNARGLVLP |
| 7mer peptide | | GYKYLGPGNGLDKGEPVNAADAAALEHDKAYDQQLKAGDNPYLKYNHA |
| underlined, starts | | DAEFQERLKEDTSFGGNLGRAVFQAKKRLLEPLGLVEEAAKTAPGKKR |
| at position 590 | | PVEQSPQEPDSSAGIGKSGAQPAKKRLNFGQTGDTESVPDPQPIGEPP |
| (immediately | | AAPSGVGSLTMASGGGAPVADNNEGADGVGSSSGNWHCDSQWLGDRVI |
| subsequent to | | TTSTRTWALPTYNNHLYKQISNSTSGGSSNDNAYFGYSTPWGYFDFNR |
| 589); 743 aa | | FHCHFSPRDWQRLINNNWGFRPKRLNFKLFNIQVKEVTDNNGVKTIAN |
| | | NLTSTVQVFTDSDYQLPYVLGSAHEGCLPPFPADVFMIPQYGYLTLND |
| | | GSQAVGRSSFYCLEYFPSQMLRTGNNFQFSYEFENVPFHSSYAHSQSL |
| | | DRLMNPLIDQYLYYLSKTINGSGQNQQTLKFSVAGPSNMAVQGRNYIP |
| | | GPSYRQQRVSTTVTQNNNSEFAWPGASSWALNGRNSLMNPGPAMASHK |
| | | EGEDRFFPLSGSLIFGKQGTGRDNVDADKVMITNEEEIKTTNPVATES |
| | | YGQVATNHQSAQAYVSSVKMQAQTGWVQNQGILPGMVWQDRDVYLQGP |
| | | IWAKIPHTDGNFHPSPLMGGFGMKHPPPQILIKNTPVPADPPTAFNKD |
| | | KLNSFITQYSTGQVSVEIEWELQKENSKRWNPEIQYTSNYYKSNNVEF |
| | | AVNTEGVYSEPRPIGTRYLTRNL |
| TTD-013 | 5 | MAADGYLPDWLEDNLSEGIREWWALKPGAPQPKANQQHQDNARGLVLP |
| 9mer peptide | | GYKYLGPGNGLDKGEPVNAADAAALEHDKAYDQQLKAGDNPYLKYNHA |
| underlined, starts at | | DAEFQERLKEDTSFGGNLGRAVFQAKKRLLEPLGLVEEAAKTAPGKKR |
| position 587 | | PVEQSPQEPDSSAGIGKSGAQPAKKRLNFGQTGDTESVPDPQPIGEPP |
| (immediately | | AAPSGVGSLTMASGGGAPVADNNEGADGVGSSSGNWHCDSQWLGDRVI |
| subsequent to | | TTSTRTWALPTYNNHLYKQISNSTSGGSSNDNAYFGYSTPWGYFDFNR |
| position 586); | | FHCHFSPRDWQRLINNNWGFRPKRLNFKLFNIQVKEVTDNNGVKTIAN |
| modification at | | NLTSTVQVFTDSDYQLPYVLGSAHEGCLPPFPADVFMIPQYGYLTLND |
| position 604; | | GSQAVGRSSFYCLEYFPSQMLRTGNNFQFSYEFENVPFHSSYAHSQSL |
| 743 aa | | DRLMNPLIDQYLYYLSKTINGSGQNQQTLKFSVAGPSNMAVQGRNYIP |
| | | GPSYRQQRVSTTVTQNNNSEFAWPGASSWALNGRNSLMNPGPAMASHK |
| | | EGEDRFFPLSGSLIFGKQGTGRDNVDADKVMITNEEEIKTINPVATES |
| | | YGQVATNHQSPLNGAVHLYAQAQTGWVPNQGILPGMVWQDRDVYLQGP |
| | | IWAKIPHTDGNFHPSPLMGGFGMKHPPPQILIKNTPVPADPPTAFNKD |
| | | KLNSFITQYSTGQVSVEIEWELQKENSKRWNPEIQYTSNYYKSNNVEF |
| | | AVNTEGVYSEPRPIGTRYLTRNL |
| TTD-014 | 8 | MAADGYLPDWLEDNLSEGIREWWALKPGAPQPKANQQHQDNARGLVLP |
| 9mer peptide | | GYKYLGPGNGLDKGEPVNAADAAALEHDKAYDQQLKAGDNPYLKYNHA |
| underlined, starts at | | DAEFQERLKEDTSFGGNLGRAVFQAKKRLLEPLGLVEEAAKTAPGKKR |
| position 587 | | PVEQSPQEPDSSAGIGKSGAQPAKKRLNFGQTGDTESVPDPQPIGEPP |
| (immediately | | AAPSGVGSLTMASGGGAPVADNNEGADGVGSSSGNWHCDSQWLGDRVI |
| subsequent to | | TTSTRTWALPTYNNHLYKQISNSTSGGSSNDNAYFGYSTPWGYFDFNR |
| position 586); | | FHCHFSPRDWQRLINNNWGFRPKRLNFKLFNIQVKEVIDNNGVKTIAN |
| modifications at | | NLTSTVQVFTDSDYQLPYVLGSAHEGCLPPFPADVFMIPQYGYLTLND |
| positions 600, 601, | | GSQAVGRSSFYCLEYFPSQMLRTGNNFQFSYEFENVPFHSSYAHSQSL |
| 602, and 604 | | DRLMNPLIDQYLYYLSKTINGSGQNQQTLKFSVAGPSNMAVQGRNYIP |
| 743 aa | | GPSYRQQRVSTTVTQNNNSEFAWPGASSWALNGRNSLMNPGPAMASHK |
| | | EGEDRFFPLSGSLIFGKQGTGRDNVDADKVMITNEEEIKTTNPVATES |
| | | YGQVATNHQSPLNGAVHLYAQAQLSPVKNQGILPGMVWQDRDVYLQGP |
| | | IWAKIPHTDGNFHPSPLMGGFGMKHPPPQILIKNTPVPADPPTAFNKD |
| | | KLNSFITQYSTGQVSVEIEWELQKENSKRWNPEIQYTSNYYKSNNVEF |
| | | AVNTEGVYSEPRPIGTRYLTRNL |

TABLE 5
Exemplary full length capsid nucleic acid sequences

| | SEQ | |
|---|---|---|
| Name and | ID | |
| Annotation | NO: | NT Sequence |
| TTD-001 | 3623 | atggctgccgatggttatcttccagattggctcgaggacaaccttagtgaaggaa |
| 9mer | | ttcgcgagtggtgggctttgaaacctggagcccctcaacccaaggcaaatcaaca |
| peptide | | acatcaagacaacgctcgaggtcttgtgcttccgggttacaaataccttggaccc |
| underlined | | ggcaacggactcgacaagggggagccggtcaacgcagcagacgcggcggccctcg |
| | | agcacgacaaggcctacgaccagcagctcaaggccggagacaacccgtacctcaa |
| | | gtacaaccacgccgacgccgagttccaggagcggctcaaagaagatacgtctttt |
| | | gggggcaacctcgggcgagcagtcttccaggccaaaaagaggcttcttgaacctc |
| | | ttggtctggttgaggaagcggctaagacggctcctggaaagaagaggcctgtaga |
| | | gcagtctcctcaggaaccggactcctccgcgggtattggcaaatcgggtgcacag |
| | | cccgctaaaaagagactcaatttcggtcagactggcgacacagagtcagtcccag |
| | | accctcaaccaatcggagaacctcccgcagccccctcaggtgtgggatctcttac |
| | | aatggcttcaggtggtggcgcaccagtggcagacaataacgaaggtgccgatgga |
| | | gtgggtagttcctcgggaaattggcattgcgattcccaatggctgggggacagag |
| | | tcatcaccaccagcacccgaacctgggccctgcccacctacaacaatcacctcta |
| | | caagcaaatctccaacagcacatctggaggatcttcaaatgacaacgcctacttc |
| | | ggctacagcaccccctgggggtattttgacttcaacagattccactgccacttct |
| | | caccacgtgactggcagcgactcatcaacaacaactggggattccggcctaagcg |
| | | actcaacttcaagctcttcaacattcaggtcaaagaggttacggacaacaatgga |
| | | gtcaagaccatcgccaataaccttaccagcacggtccaggtcttcacggactcag |
| | | actatcagctcccgtacgtgctcgggtcggctcacgagggctgcctcccgccgtt |
| | | cccagcggacgttttcatgattcctcagtacgggtatctgacgcttaatgatgga |
| | | agccaggccgtgggtcgttcgtccttttactgcctggaatatttcccgtcgcaaa |
| | | tgctaagaacgggtaacaacttccagttcagctacgagtttgagaacgtaccttt |
| | | ccatagcagctacgctcacagccaaagcctggaccgactaatgaatccactcatc |
| | | gaccaatacttgtactatctctcaaagactattaacggttctggacagaatcaac |
| | | aaacgctaaaattcagtgtggccggacccagcaacatggctgtccagggaagaaa |
| | | ctacatacctggacccagctaccgacaacaacgtgtctcaaccactgtgactcaa |
| | | aacaacaacagcgaatttgcttggcctggagcttcttcttgggctctcaatggac |
| | | gtaatagcttgatgaatcctggacctgctatggccagccacaaagaaggagagga |
| | | ccgtttctttcctttgtctggatctttaatttttggcaaacaaggaactggaaga |
| | | gacaacgtggatgcggacaaagtcatgataaccaacgaagaagaaattaaaacta |
| | | ctaacccggtagcaacggagtcctatggacaagtggccacaaaccaccagagtcc |
| | | gcttaatggtgccgtccatctttatgctcaggcgcagaccggctgggttcaaaac |
| | | caaggaatacttccgggtatggtttggcaggacagagatgtgtacctgcaaggac |
| | | ccatttgggccaaaattcctcacacggacggcaactttcacccttctccgctgat |
| | | gggagggtttggaatgaagcacccgcctcctcagatcctcatcaaaaacacacct |
| | | gtacctgcCgatcctccaacggccttcaacaaggacaagctgaactctttcatca |
| | | cccagtattctactggccaagtcagcgtggagatcgagtgggagctgcagaagga |
| | | aaacagcaagcgGtggaacccggagatccagtacacttccaactattacaagtct |
| | | aataatgttgaatttgctgttaatactgaaggtgtatatagtgaaccccgcccca |
| | | ttggcaccagatacctgactcgtaatctgtaa |
| TTD-002 | 3624 | atggctgccgatggttatcttccagattggctcgaggacaaccttagtgaaggaa |
| 7mer | | ttcgcgagtggtgggctttgaaacctggagcccctcaacccaaggcaaatcaaca |
| peptide | | acatcaagacaacgctcgaggtcttgtgcttccgggttacaaataccttggaccc |
| underlined | | ggcaacggactcgacaagggggagccggtcaacgcagcagacgcggcggccctcg |
| | | agcacgacaaggcctacgaccagcagctcaaggccggagacaacccgtacctcaa |
| | | gtacaaccacgccgacgccgagttccaggagcggctcaaagaagatacgtctttt |
| | | gggggcaacctcgggcgagcagtcttccaggccaaaaagaggcttcttgaacctc |
| | | ttggtctggttgaggaagcggctaagacggctcctggaaagaagaggcctgtaga |
| | | gcagtctcctcaggaaccggactcctccgcgggtattggcaaatcgggtgcacag |
| | | cccgctaaaaagagactcaatttcggtcagactggcgacacagagtcagtcccag |
| | | accctcaaccaatcggagaacctcccgcagccccctcaggtgtgggatctcttac |
| | | aatggcttcaggtggtggcgcaccagtggcagacaataacgaaggtgccgatgga |
| | | gtgggtagttcctcgggaaattggcattgcgattcccaatggctgggggacagag |
| | | tcatcaccaccagcacccgaacctgggccctgcccacctacaacaatcacctcta |
| | | caagcaaatctccaacagcacatctggaggatcttcaaatgacaacgcctacttc |
| | | ggctacagcaccccctgggggtattttgacttcaacagattccactgccacttct |
| | | caccacgtgactggcagcgactcatcaacaacaactggggattccggcctaagcg |
| | | actcaacttcaagctcttcaacattcaggtcaaagaggttacggacaacaatgga |
| | | gtcaagaccatcgccaataaccttaccagcacggtccaggtcttcacggactcag |
| | | actatcagctcccgtacgtgctcgggtcggctcacgagggctgcctcccgccgtt |
| | | cccagcggacgttttcatgattcctcagtacgggtatctgacgcttaatgatgga |
| | | agccaggccgtgggtcgttcgtccttttactgcctggaatatttcccgtcgcaaa |
| | | tgctaagaacgggtaacaacttccagttcagctacgagtttgagaacgtaccttt |
| | | ccatagcagctacgctcacagccaaagcctggaccgactaatgaatccactcatc |
| | | gaccaatacttgtactatctctcaaagactattaacggttctggacagaatcaac |
| | | aaacgctaaaattcagtgtggccggacccagcaacatggctgtccagggaagaaa |
| | | ctacatacctggacccagctaccgacaacaacgtgtctcaaccactgtgactcaa |
| | | aacaacaacagcgaatttgcttggcctggagcttcttcttgggctctcaatggac |
| | | gtaatagcttgatgaatcctggacctgctatggccagccacaaagaaggagagga |
| | | ccgtttctttcctttgtctggatctttaatttttggcaaacaaggaactggaaga |
| | | gacaacgtggatgcggacaaagtcatgataaccaacgaagaagaaattaaaacta |
| | | ctaacccggtagcaacggagtcctatggacaagtggccacaaaccaccagagtgc |
| | | acaggctcgtgattctccgaagggttggcaggcgcagaccggctgggttcaaaac |
| | | caaggaatacttccgggtatggtttggcaggacagagatgtgtacctgcaaggac |
| | | ccatttgggccaaaattcctcacacggacggcaactttcacccttctccgctgat |
| | | gggagggtttggaatgaagcacccgcctcctcagatcctcatcaaaaacacacct |
| | | gtacctgcCgatcctccaacggccttcaacaaggacaagctgaactctttcatca |
| | | cccagtattctactggccaagtcagcgtggagatcgagtgggagctgcagaagga |
| | | aaacagcaagcgGtggaacccggagatccagtacacttccaactattacaagtct |
| | | aataatgttgaatttgctgttaatactgaaggtgtatatagtgaaccccgcccca |
| | | ttggcaccagatacctgactcgtaatctgtaa |
| TTD-003 | 3625 | atggctgccgatggttatcttccagattggctcgaggacaaccttagtgaaggaa |
| 7mer | | ttcgcgagtggtgggctttgaaacctggagcccctcaacccaaggcaaatcaaca |
| peptide | | acatcaagacaacgctcgaggtcttgtgcttccgggttacaaataccttggaccc |
| underlined | | ggcaacggactcgacaagggggagccggtcaacgcagcagacgcggcggccctcg |
| | | agcacgacaaggcctacgaccagcagctcaaggccggagacaacccgtacctcaa |
| | | gtacaaccacgccgacgccgagttccaggagcggctcaaagaagatacgtctttt |
| | | gggggcaacctcgggcgagcagtcttccaggccaaaaagaggcttcttgaacctc |
| | | ttggtctggttgaggaagcggctaagacggctcctggaaagaagaggcctgtaga |
| | | gcagtctcctcaggaaccggactcctccgcgggtattggcaaatcgggtgcacag |
| | | cccgctaaaaagagactcaatttcggtcagactggcgacacagagtcagtcccag |
| | | accctcaaccaatcggagaacctcccgcagccccctcaggtgtgggatctcttac |
| | | aatggcttcaggtggtggcgcaccagtggcagacaataacgaaggtgccgatgga |
| | | gtgggtagttcctcgggaaattggcattgcgattcccaatggctgggggacagag |
| | | tcatcaccaccagcacccgaacctgggccctgcccacctacaacaatcacctcta |
| | | caagcaaatctccaacagcacatctggaggatcttcaaatgacaacgcctacttc |
| | | ggctacagcaccccctgggggtattttgacttcaacagattccactgccacttct |
| | | caccacgtgactggcagcgactcatcaacaacaactggggattccggcctaagcg |
| | | actcaacttcaagctcttcaacattcaggtcaaagaggttacggacaacaatgga |
| | | gtcaagaccatcgccaataaccttaccagcacggtccaggtcttcacggactcag |
| | | actatcagctcccgtacgtgctcgggtcggctcacgagggctgcctcccgccgtt |
| | | cccagcggacgttttcatgattcctcagtacgggtatctgacgcttaatgatgga |
| | | agccaggccgtgggtcgttcgtccttttactgcctggaatatttcccgtcgcaaa |
| | | tgctaagaacgggtaacaacttccagttcagctacgagtttgagaacgtaccttt |
| | | ccatagcagctacgctcacagccaaagcctggaccgactaatgaatccactcatc |
| | | gaccaatacttgtactatctctcaaagactattaacggttctggacagaatcaac |
| | | aaacgctaaaattcagtgtggccggacccagcaacatggctgtccagggaagaaa |
| | | ctacatacctggacccagctaccgacaacaacgtgtctcaaccactgtgactcaa |
| | | aacaacaacagcgaatttgcttggcctggagcttcttcttgggctctcaatggac |
| | | gtaatagcttgatgaatcctggacctgctatggccagccacaaagaaggagagga |
| | | ccgtttctttcctttgtctggatctttaatttttggcaaacaaggaactggaaga |
| | | gacaacgtggatgcggacaaagtcatgataaccaacgaagaagaaattaaaacta |
| | | ctaacccggtagcaacggagtcctatggacaagtggccacaaaccaccagagtgc |
| | | acaggctcgtgattctccgaagggttggcaggcgcagaccggctgggttcaaaac |
| | | caaggaatacttccgggtatggtttggcaggacagagatgtgtacctgcaaggac |
| | | ccatttgggccaaaattcctcacacggacggcaactttcacccttctccgctgat |
| | | gggagggtttggaatgaagcacccgcctcctcagatcctcatcaaaaacacacct |
| | | gtacctgcggatcctccaacggccttcaacaaggacaagctgaactctttcatca |
| | | cccagtattctactggccaagtcagcgtggagatcgagtgggagctgcagaagga |
| | | aaacagcaagcgctggaacccggagatccagtacacttccaactattacaagtct |
| | | aataatgttgaatttgctgttaatactgaaggtgtatatagtgaaccccgcccca |
| | | ttggcaccagatacctgactcgtaatctgtaa |
| | 3626 | atggctgccgatggttatcttccagattggctcgaggacaaccttagtgaaggaa |
| | | ttcgcgagtggtgggctttgaaacctggagcccctcaacccaaggcaaatcaaca |
| | | acatcaagacaacgctcgaggtcttgtgcttccgggttacaaataccttggaccc |
| | | ggcaacggactcgacaagggggagccggtcaacgcagcagacgcggcggccctcg |
| | | agcacgacaaggcctacgaccagcagctcaaggccggagacaacccgtacctcaa |
| | | gtacaaccacgccgacgccgagttccaggagcggctcaaagaagatacgtctttt |
| | | gggggcaacctcgggcgagcagtcttccaggccaaaaagaggcttcttgaacctc |
| | | ttggtctggttgaggaagcggctaagacggctcctggaaagaagaggcctgtaga |
| | | gcagtctcctcaggaaccggactcctccgcgggtattggcaaatcgggtgcacag |
| | | cccgctaaaaagagactcaatttcggtcagactggcgacacagagtcagtcccag |
| | | accctcaaccaatcggagaacctcccgcagccccctcaggtgtgggatctcttac |
| | | aatggcttcaggtggtggcgcaccagtggcagacaataacgaaggtgccgatgga |
| | | gtgggtagttcctcgggaaattggcattgcgattcccaatggctgggggacagag |
| | | tcatcaccaccagcacccgaacctgggccctgcccacctacaacaatcacctcta |
| | | caagcaaatctccaacagcacatctggaggatcttcaaatgacaacgcctacttc |
| | | ggctacagcaccccctgggggtattttgacttcaacagattccactgccacttct |
| | | caccacgtgactggcagcgactcatcaacaacaactggggattccggcctaagcg |
| | | actcaacttcaagctcttcaacattcaggtcaaagaggttacggacaacaatgga |
| | | gtcaagaccatcgccaataaccttaccagcacggtccaggtcttcacggactcag |
| | | actatcagctcccgtacgtgctcgggtcggctcacgagggctgcctcccgccgtt |
| | | cccagcggacgttttcatgattcctcagtacgggtatctgacgcttaatgatgga |
| | | agccaggccgtgggtcgttcgtccttttactgcctggaatatttcccgtcgcaaa |
| | | tgctaagaacgggtaacaacttccagttcagctacgagtttgagaacgtaccttt |
| | | ccatagcagctacgctcacagccaaagcctggaccgactaatgaatccactcatc |
| | | gaccaatacttgtactatctctcaaagactattaacggttctggacagaatcaac |
| | | aaacgctaaaattcagtgtggccggacccagcaacatggctgtccagggaagaaa |
| | | ctacatacctggacccagctaccgacaacaacgtgtctcaaccactgtgactcaa |
| | | aacaacaacagcgaatttgcttggcctggagcttcttcttgggctctcaatggac |
| | | gtaatagcttgatgaatcctggacctgctatggccagccacaaagaaggagagga |
| | | ccgtttctttcctttgtctggatctttaatttttggcaaacaaggaactggaaga |
| | | gacaacgtggatgcggacaaagtcatgataaccaacgaagaagaaattaaaacta |
| | | ctaacccggtagcaacggagtcctatggacaagtggccacaaaccaccagagtgc |
| | | acaggcttattctacggatgtgaggatgcaggcgcagaccggctgggttcaaaac |
| | | caaggaatacttccgggtatggtttggcaggacagagatgtgtacctgcaaggac |
| | | ccatttgggccaaaattcctcacacggacggcaactttcacccttctccgctgat |
| | | gggagggtttggaatgaagcacccgcctcctcagatcctcatcaaaaacacacct |
| | | gtacctgcCgatcctccaacggccttcaacaaggacaagctgaactctttcatca |
| | | cccagtattctactggccaagtcagcgtggagatcgagtgggagctgcagaagga |
| | | aaacagcaagcgGtggaacccggagatccagtacacttccaactattacaagtct |
| | | aataatgttgaatttgctgttaatactgaaggtgtatatagtgaaccccgcccca |
| | | ttggcaccagatacctgactcgtaatctgtaa |
| TTD-004 | 3627 | atggctgccgatggttatcttccagattggctcgaggacaaccttagtgaaggaa |
| 7mer | | ttcgcgagtggtgggctttgaaacctggagcccctcaacccaaggcaaatcaaca |
| peptide | | acatcaagacaacgctcgaggtcttgtgcttccgggttacaaataccttggaccc |
| underlined | | ggcaacggactcgacaagggggagccggtcaacgcagcagacgcggcggccctcg |
| | | agcacgacaaggcctacgaccagcagctcaaggccggagacaacccgtacctcaa |
| | | gtacaaccacgccgacgccgagttccaggagcggctcaaagaagatacgtctttt |
| | | gggggcaacctcgggcgagcagtcttccaggccaaaaagaggcttcttgaacctc |
| | | ttggtctggttgaggaagcggctaagacggctcctggaaagaagaggcctgtaga |
| | | gcagtctcctcaggaaccggactcctccgcgggtattggcaaatcgggtgcacag |
| | | cccgctaaaaagagactcaatttcggtcagactggcgacacagagtcagtcccag |
| | | accctcaaccaatcggagaacctcccgcagccccctcaggtgtgggatctcttac |
| | | aatggcttcaggtggtggcgcaccagtggcagacaataacgaaggtgccgatgga |
| | | gtgggtagttcctcgggaaattggcattgcgattcccaatggctgggggacagag |
| | | tcatcaccaccagcacccgaacctgggccctgcccacctacaacaatcacctcta |
| | | caagcaaatctccaacagcacatctggaggatcttcaaatgacaacgcctacttc |
| | | ggctacagcaccccctgggggtattttgacttcaacagattccactgccacttct |
| | | caccacgtgactggcagcgactcatcaacaacaactggggattccggcctaagcg |
| | | actcaacttcaagctcttcaacattcaggtcaaagaggttacggacaacaatgga |
| | | gtcaagaccatcgccaataaccttaccagcacggtccaggtcttcacggactcag |
| | | actatcagctcccgtacgtgctcgggtcggctcacgagggctgcctcccgccgtt |
| | | cccagcggacgttttcatgattcctcagtacgggtatctgacgcttaatgatgga |
| | | agccaggccgtgggtcgttcgtccttttactgcctggaatatttcccgtcgcaaa |
| | | tgctaagaacgggtaacaacttccagttcagctacgagtttgagaacgtaccttt |
| | | ccatagcagctacgctcacagccaaagcctggaccgactaatgaatccactcatc |
| | | gaccaatacttgtactatctctcaaagactattaacggttctggacagaatcaac |
| | | aaacgctaaaattcagtgtggccggacccagcaacatggctgtccagggaagaaa |
| | | ctacatacctggacccagctaccgacaacaacgtgtctcaaccactgtgactcaa |
| | | aacaacaacagcgaatttgcttggcctggagcttcttcttgggctctcaatggac |
| | | gtaatagcttgatgaatcctggacctgctatggccagccacaaagaaggagagga |
| | | ccgtttctttcctttgtctggatctttaatttttggcaaacaaggaactggaaga |
| | | gacaacgtggatgcggacaaagtcatgataaccaacgaagaagaaattaaaacta |
| | | ctaacccggtagcaacggagtcctatggacaagtggccacaaaccaccagagtgc |
| | | acagattgttatgaattcgttgaaggctcaggcgcagaccggctgggttcaaaac |
| | | caaggaatacttccgggtatggtttggcaggacagagatgtgtacctgcaaggac |
| | | ccatttgggccaaaattcctcacacggacggcaactttcacccttctccgctgat |
| | | gggagggtttggaatgaagcacccgcctcctcagatcctcatcaaaaacacacct |
| | | gtacctgcCgatcctccaacggccttcaacaaggacaagctgaactctttcatca |
| | | cccagtattctactggccaagtcagcgtggagatcgagtgggagctgcagaagga |
| | | aaacagcaagcgGtggaacccggagatccagtacacttccaactattacaagtct |
| | | aataatgttgaatttgctgttaatactgaaggtgtatatagtgaaccccgcccca |
| | | ttggcaccagatacctgactcgtaatctgtaa |
| TTD-005 | 3628 | atggctgccgatggttatcttccagattggctcgaggacaaccttagtgaaggaa |
| 7mer | | ttcgcgagtggtgggctttgaaacctggagcccctcaacccaaggcaaatcaaca |
| peptide | | acatcaagacaacgctcgaggtcttgtgcttccgggttacaaataccttggaccc |
| underlined | | ggcaacggactcgacaagggggagccggtcaacgcagcagacgcggcggccctcg |
| | | agcacgacaaggcctacgaccagcagctcaaggccggagacaacccgtacctcaa |
| | | gtacaaccacgccgacgccgagttccaggagcggctcaaagaagatacgtctttt |
| | | gggggcaacctcgggcgagcagtcttccaggccaaaaagaggcttcttgaacctc |
| | | ttggtctggttgaggaagcggctaagacggctcctggaaagaagaggcctgtaga |
| | | gcagtctcctcaggaaccggactcctccgcgggtattggcaaatcgggtgcacag |
| | | cccgctaaaaagagactcaatttcggtcagactggcgacacagagtcagtcccag |
| | | accctcaaccaatcggagaacctcccgcagccccctcaggtgtgggatctcttac |
| | | aatggcttcaggtggtggcgcaccagtggcagacaataacgaaggtgccgatgga |
| | | gtgggtagttcctcgggaaattggcattgcgattcccaatggctgggggacagag |
| | | tcatcaccaccagcacccgaacctgggccctgcccacctacaacaatcacctcta |
| | | caagcaaatctccaacagcacatctggaggatcttcaaatgacaacgcctacttc |
| | | ggctacagcaccccctgggggtattttgacttcaacagattccactgccacttct |
| | | caccacgtgactggcagcgactcatcaacaacaactggggattccggcctaagcg |
| | | actcaacttcaagctcttcaacattcaggtcaaagaggttacggacaacaatgga |
| | | gtcaagaccatcgccaataaccttaccagcacggtccaggtcttcacggactcag |
| | | actatcagctcccgtacgtgctcgggtcggctcacgagggctgcctcccgccgtt |
| | | cccagcggacgttttcatgattcctcagtacgggtatctgacgcttaatgatgga |
| | | agccaggccgtgggtcgttcgtccttttactgcctggaatatttcccgtcgcaaa |
| | | tgctaagaacgggtaacaacttccagttcagctacgagtttgagaacgtaccttt |
| | | ccatagcagctacgctcacagccaaagcctggaccgactaatgaatccactcatc |
| | | gaccaatacttgtactatctctcaaagactattaacggttctggacagaatcaac |
| | | aaacgctaaaattcagtgtggccggacccagcaacatggctgtccagggaagaaa |
| | | ctacatacctggacccagctaccgacaacaacgtgtctcaaccactgtgactcaa |
| | | aacaacaacagcgaatttgcttggcctggagcttcttcttgggctctcaatggac |
| | | gtaatagcttgatgaatcctggacctgctatggccagccacaaagaaggagagga |
| | | ccgtttctttcctttgtctggatctttaatttttggcaaacaaggaactggaaga |
| | | gacaacgtggatgcggacaaagtcatgataaccaacgaagaagaaattaaaacta |
| | | ctaacccggtagcaacggagtcctatggacaagtggccacaaaccaccagagtgc |
| | | acaggctcgggagagtcctcgtgggctgcaggcgcagaccggctgggttcaaaac |
| | | caaggaatacttccgggtatggtttggcaggacagagatgtgtacctgcaaggac |
| | | ccatttgggccaaaattcctcacacggacggcaactttcacccttctccgctgat |
| | | gggagggtttggaatgaagcacccgcctcctcagatcctcatcaaaaacacacct |
| | | gtacctgcCgatcctccaacggccttcaacaaggacaagctgaactctttcatca |
| | | cccagtattctactggccaagtcagcgtggagatcgagtgggagctgcagaagga |
| | | aaacagcaagcgGtggaacccggagatccagtacacttccaactattacaagtct |
| | | aataatgttgaatttgctgttaatactgaaggtgtatatagtgaaccccgcccca |
| | | ttggcaccagatacctgactcgtaatctgtaa |
| TTD-006 | 3629 | atggctgccgatggttatcttccagattggctcgaggacaaccttagtgaaggaa |
| 7mer | | ttcgcgagtggtgggctttgaaacctggagcccctcaacccaaggcaaatcaaca |
| peptide | | acatcaagacaacgctcgaggtcttgtgcttccgggttacaaataccttggaccc |
| underlined | | ggcaacggactcgacaagggggagccggtcaacgcagcagacgcggcggccctcg |
| | | agcacgacaaggcctacgaccagcagctcaaggccggagacaacccgtacctcaa |
| | | gtacaaccacgccgacgccgagttccaggagcggctcaaagaagatacgtctttt |
| | | gggggcaacctcgggcgagcagtcttccaggccaaaaagaggcttcttgaacctc |
| | | ttggtctggttgaggaagcggctaagacggctcctggaaagaagaggcctgtaga |
| | | gcagtctcctcaggaaccggactcctccgcgggtattggcaaatcgggtgcacag |
| | | cccgctaaaaagagactcaatttcggtcagactggcgacacagagtcagtcccag |
| | | accctcaaccaatcggagaacctcccgcagccccctcaggtgtgggatctcttac |
| | | aatggcttcaggtggtggcgcaccagtggcagacaataacgaaggtgccgatgga |
| | | gtgggtagttcctcgggaaattggcattgcgattcccaatggctgggggacagag |
| | | tcatcaccaccagcacccgaacctgggccctgcccacctacaacaatcacctcta |
| | | caagcaaatctccaacagcacatctggaggatcttcaaatgacaacgcctacttc |
| | | ggctacagcaccccctgggggtattttgacttcaacagattccactgccacttct |
| | | caccacgtgactggcagcgactcatcaacaacaactggggattccggcctaagcg |
| | | actcaacttcaagctcttcaacattcaggtcaaagaggttacggacaacaatgga |
| | | gtcaagaccatcgccaataaccttaccagcacggtccaggtcttcacggactcag |
| | | actatcagctcccgtacgtgctcgggtcggctcacgagggctgcctcccgccgtt |
| | | cccagcggacgttttcatgattcctcagtacgggtatctgacgcttaatgatgga |
| | | agccaggccgtgggtcgttcgtccttttactgcctggaatatttcccgtcgcaaa |
| | | tgctaagaacgggtaacaacttccagttcagctacgagtttgagaacgtaccttt |
| | | ccatagcagctacgctcacagccaaagcctggaccgactaatgaatccactcatc |
| | | gaccaatacttgtactatctctcaaagactattaacggttctggacagaatcaac |
| | | aaacgctaaaattcagtgtggccggacccagcaacatggctgtccagggaagaaa |
| | | ctacatacctggacccagctaccgacaacaacgtgtctcaaccactgtgactcaa |
| | | aacaacaacagcgaatttgcttggcctggagcttcttcttgggctctcaatggac |
| | | gtaatagcttgatgaatcctggacctgctatggccagccacaaagaaggagagga |
| | | ccgtttctttcctttgtctggatctttaatttttggcaaacaaggaactggaaga |
| | | gacaacgtggatgcggacaaagtcatgataaccaacgaagaagaaattaaaacta |
| | | ctaacccggtagcaacggagtcctatggacaagtggccacaaaccaccagagtgc |
| | | acaggctagttttaatgatactagggctcaggcgcagaccggctgggttcaaaac |
| | | caaggaatacttccgggtatggtttggcaggacagagatgtgtacctgcaaggac |
| | | ccatttgggccaaaattcctcacacggacggcaactttcacccttctccgctgat |
| | | gggagggtttggaatgaagcacccgcctcctcagatcctcatcaaaaacacacct |
| | | gtacctgcCgatcctccaacggccttcaacaaggacaagctgaactctttcatca |
| | | cccagtattctactggccaagtcagcgtggagatcgagtgggagctgcagaagga |
| | | aaacagcaagcgGtggaacccggagatccagtacacttccaactattacaagtct |
| | | aataatgttgaatttgctgttaatactgaaggtgtatatagtgaaccccgcccca |
| | | ttggcaccagatacctgactcgtaatctgtaa |
| TTD-007 | 3630 | atggctgccgatggttatcttccagattggctcgaggacaaccttagtgaaggaa |
| 9mer | | ttcgcgagtggtgggctttgaaacctggagcccctcaacccaaggcaaatcaaca |
| peptide | | acatcaagacaacgctcgaggtcttgtgcttccgggttacaaataccttggaccc |
| underlined | | ggcaacggactcgacaagggggagccggtcaacgcagcagacgcggcggccctcg |
| | | agcacgacaaggcctacgaccagcagctcaaggccggagacaacccgtacctcaa |
| | | gtacaaccacgccgacgccgagttccaggagcggctcaaagaagatacgtctttt |
| | | gggggcaacctcgggcgagcagtcttccaggccaaaaagaggcttcttgaacctc |
| | | ttggtctggttgaggaagcggctaagacggctcctggaaagaagaggcctgtaga |
| | | gcagtctcctcaggaaccggactcctccgcgggtattggcaaatcgggtgcacag |
| | | cccgctaaaaagagactcaatttcggtcagactggcgacacagagtcagtcccag |
| | | accctcaaccaatcggagaacctcccgcagccccctcaggtgtgggatctcttac |
| | | aatggcttcaggtggtggcgcaccagtggcagacaataacgaaggtgccgatgga |
| | | gtgggtagttcctcgggaaattggcattgcgattcccaatggctgggggacagag |
| | | tcatcaccaccagcacccgaacctgggccctgcccacctacaacaatcacctcta |
| | | caagcaaatctccaacagcacatctggaggatcttcaaatgacaacgcctacttc |
| | | ggctacagcaccccctgggggtattttgacttcaacagattccactgccacttct |
| | | caccacgtgactggcagcgactcatcaacaacaactggggattccggcctaagcg |
| | | actcaacttcaagctcttcaacattcaggtcaaagaggttacggacaacaatgga |
| | | gtcaagaccatcgccaataaccttaccagcacggtccaggtcttcacggactcag |
| | | actatcagctcccgtacgtgctcgggtcggctcacgagggctgcctcccgccgtt |
| | | cccagcggacgttttcatgattcctcagtacgggtatctgacgcttaatgatgga |
| | | agccaggccgtgggtcgttcgtccttttactgcctggaatatttcccgtcgcaaa |
| | | tgctaagaacgggtaacaacttccagttcagctacgagtttgagaacgtaccttt |
| | | ccatagcagctacgctcacagccaaagcctggaccgactaatgaatccactcatc |
| | | gaccaatacttgtactatctctcaaagactattaacggttctggacagaatcaac |
| | | aaacgctaaaattcagtgtggccggacccagcaacatggctgtccagggaagaaa |
| | | ctacatacctggacccagctaccgacaacaacgtgtctcaaccactgtgactcaa |
| | | aacaacaacagcgaatttgcttggcctggagcttcttcttgggctctcaatggac |
| | | gtaatagcttgatgaatcctggacctgctatggccagccacaaagaaggagagga |
| | | ccgtttctttcctttgtctggatctttaatttttggcaaacaaggaactggaaga |
| | | gacaacgtggatgcggacaaagtcatgataaccaacgaagaagaaattaaaacta |
| | | ctaacccggtagcaacggagtcctatggacaagtggccacaaaccaccagagtgg |
| | | tggtacgttggccgtcgtgtcgcttgctcaggcgcagaccggctgggttcaaaac |
| | | caaggaatacttccgggtatggtttggcaggacagagatgtgtacctgcaaggac |
| | | ccatttgggccaaaattcctcacacggacggcaactttcacccttctccgctgat |
| | | gggagggtttggaatgaagcacccgcctcctcagatcctcatcaaaaacacacct |
| | | gtacctgcCgatcctccaacggccttcaacaaggacaagctgaactctttcatca |
| | | cccagtattctactggccaagtcagcgtggagatcgagtgggagctgcagaagga |
| | | aaacagcaagcgGtggaacccggagatccagtacacttccaactattacaagtct |
| | | aataatgttgaatttgctgttaatactgaaggtgtatatagtgaaccccgcccca |
| | | ttggcaccagatacctgactcgtaatctgtaa |
| TTD-008 | 3631 | atggctgccgatggttatcttccagattggctcgaggacaaccttagtgaaggaa |
| 7mer | | ttcgcgagtggtgggctttgaaacctggagcccctcaacccaaggcaaatcaaca |
| peptide | | acatcaagacaacgctcgaggtcttgtgcttccgggttacaaataccttggaccc |
| underlined | | ggcaacggactcgacaagggggagccggtcaacgcagcagacgcggcggccctcg |
| | | agcacgacaaggcctacgaccagcagctcaaggccggagacaacccgtacctcaa |
| | | gtacaaccacgccgacgccgagttccaggagcggctcaaagaagatacgtctttt |
| | | gggggcaacctcgggcgagcagtcttccaggccaaaaagaggcttcttgaacctc |
| | | ttggtctggttgaggaagcggctaagacggctcctggaaagaagaggcctgtaga |
| | | gcagtctcctcaggaaccggactcctccgcgggtattggcaaatcgggtgcacag |
| | | cccgctaaaaagagactcaatttcggtcagactggcgacacagagtcagtcccag |
| | | accctcaaccaatcggagaacctcccgcagccccctcaggtgtgggatctcttac |
| | | aatggcttcaggtggtggcgcaccagtggcagacaataacgaaggtgccgatgga |
| | | gtgggtagttcctcgggaaattggcattgcgattcccaatggctgggggacagag |
| | | tcatcaccaccagcacccgaacctgggccctgcccacctacaacaatcacctcta |
| | | caagcaaatctccaacagcacatctggaggatcttcaaatgacaacgcctacttc |
| | | ggctacagcaccccctgggggtattttgacttcaacagattccactgccacttct |
| | | caccacgtgactggcagcgactcatcaacaacaactggggattccggcctaagcg |
| | | actcaacttcaagctcttcaacattcaggtcaaagaggttacggacaacaatgga |
| | | gtcaagaccatcgccaataaccttaccagcacggtccaggtcttcacggactcag |
| | | actatcagctcccgtacgtgctcgggtcggctcacgagggctgcctcccgccgtt |
| | | cccagcggacgttttcatgattcctcagtacgggtatctgacgcttaatgatgga |
| | | agccaggccgtgggtcgttcgtccttttactgcctggaatatttcccgtcgcaaa |
| | | tgctaagaacgggtaacaacttccagttcagctacgagtttgagaacgtaccttt |
| | | ccatagcagctacgctcacagccaaagcctggaccgactaatgaatccactcatc |
| | | gaccaatacttgtactatctctcaaagactattaacggttctggacagaatcaac |
| | | aaacgctaaaattcagtgtggccggacccagcaacatggctgtccagggaagaaa |
| | | ctacatacctggacccagctaccgacaacaacgtgtctcaaccactgtgactcaa |
| | | aacaacaacagcgaatttgcttggcctggagcttcttcttgggctctcaatggac |
| | | gtaatagcttgatgaatcctggacctgctatggccagccacaaagaaggagagga |
| | | ccgtttctttcctttgtctggatctttaatttttggcaaacaaggaactggaaga |
| | | gacaacgtggatgcggacaaagtcatgataaccaacgaagaagaaattaaaacta |
| | | ctaacccggtagcaacggagtcctatggacaagtggccacaaaccaccagagtgc |
| | | acaggcttatgggttgccgaagggtcctcaggcgcagaccggctgggttcaaaac |
| | | caaggaatacttccgggtatggtttggcaggacagagatgtgtacctgcaaggac |
| | | ccatttgggccaaaattcctcacacggacggcaactttcacccttctccgctgat |
| | | gggagggtttggaatgaagcacccgcctcctcagatcctcatcaaaaacacacct |
| | | gtacctgcCgatcctccaacggccttcaacaaggacaagctgaactctttcatca |
| | | cccagtattctactggccaagtcagcgtggagatcgagtgggagctgcagaagga |
| | | aaacagcaagcgGtggaacccggagatccagtacacttccaactattacaagtct |
| | | aataatgttgaatttgctgttaatactgaaggtgtatatagtgaaccccgcccca |
| | | ttggcaccagatacctgactcgtaatctgtaa |
| TTD-009 | 3632 | atggctgccgatggttatcttccagattggctcgaggacaaccttagtgaaggaa |
| 7mer | | ttcgcgagtggtgggctttgaaacctggagcccctcaacccaaggcaaatcaaca |
| peptide | | acatcaagacaacgctcgaggtcttgtgcttccgggttacaaataccttggaccc |
| underlined | | ggcaacggactcgacaagggggagccggtcaacgcagcagacgcggcggccctcg |
| | | agcacgacaaggcctacgaccagcagctcaaggccggagacaacccgtacctcaa |
| | | gtacaaccacgccgacgccgagttccaggagcggctcaaagaagatacgtctttt |
| | | gggggcaacctcgggcgagcagtcttccaggccaaaaagaggcttcttgaacctc |
| | | ttggtctggttgaggaagcggctaagacggctcctggaaagaagaggcctgtaga |
| | | gcagtctcctcaggaaccggactcctccgcgggtattggcaaatcgggtgcacag |
| | | cccgctaaaaagagactcaatttcggtcagactggcgacacagagtcagtcccag |
| | | accctcaaccaatcggagaacctcccgcagccccctcaggtgtgggatctcttac |
| | | aatggcttcaggtggtggcgcaccagtggcagacaataacgaaggtgccgatgga |
| | | gtgggtagttcctcgggaaattggcattgcgattcccaatggctgggggacagag |
| | | tcatcaccaccagcacccgaacctgggccctgcccacctacaacaatcacctcta |
| | | caagcaaatctccaacagcacatctggaggatcttcaaatgacaacgcctacttc |
| | | ggctacagcaccccctgggggtattttgacttcaacagattccactgccacttct |
| | | caccacgtgactggcagcgactcatcaacaacaactggggattccggcctaagcg |
| | | actcaacttcaagctcttcaacattcaggtcaaagaggttacggacaacaatgga |
| | | gtcaagaccatcgccaataaccttaccagcacggtccaggtcttcacggactcag |
| | | actatcagctcccgtacgtgctcgggtcggctcacgagggctgcctcccgccgtt |
| | | cccagcggacgttttcatgattcctcagtacgggtatctgacgcttaatgatgga |
| | | agccaggccgtgggtcgttcgtccttttactgcctggaatatttcccgtcgcaaa |
| | | tgctaagaacgggtaacaacttccagttcagctacgagtttgagaacgtaccttt |
| | | ccatagcagctacgctcacagccaaagcctggaccgactaatgaatccactcatc |
| | | gaccaatacttgtactatctctcaaagactattaacggttctggacagaatcaac |
| | | aaacgctaaaattcagtgtggccggacccagcaacatggctgtccagggaagaaa |
| | | ctacatacctggacccagctaccgacaacaacgtgtctcaaccactgtgactcaa |
| | | aacaacaacagcgaatttgcttggcctggagcttcttcttgggctctcaatggac |
| | | gtaatagcttgatgaatcctggacctgctatggccagccacaaagaaggagagga |
| | | ccgtttctttcctttgtctggatctttaatttttggcaaacaaggaactggaaga |
| | | gacaacgtggatgcggacaaagtcatgataaccaacgaagaagaaattaaaacta |
| | | ctaacccggtagcaacggagtcctatggacaagtggccacaaaccaccagagtgc |
| | | acaggcttcgactgggacgcttcggcttcaggcgcagaccggctgggttcaaaac |
| | | caaggaatacttccgggtatggtttggcaggacagagatgtgtacctgcaaggac |
| | | ccatttgggccaaaattcctcacacggacggcaactttcacccttctccgctgat |
| | | gggagggtttggaatgaagcacccgcctcctcagatcctcatcaaaaacacacct |
| | | gtacctgcCgatcctccaacggccttcaacaaggacaagctgaactctttcatca |
| | | cccagtattctactggccaagtcagcgtggagatcgagtgggagctgcagaagga |
| | | aaacagcaagcgGtggaacccggagatccagtacacttccaactattacaagtct |
| | | aataatgttgaatttgctgttaatactgaaggtgtatatagtgaaccccgcccca |
| | | ttggcaccagatacctgactcgtaatctgtaa |
| TTD-010 | 3633 | atggctgccgatggttatcttccagattggctcgaggacaaccttagtgaaggaa |
| 7mer | | ttcgcgagtggtgggctttgaaacctggagcccctcaacccaaggcaaatcaaca |
| peptide | | acatcaagacaacgctcgaggtcttgtgcttccgggttacaaataccttggaccc |
| underlined | | ggcaacggactcgacaagggggagccggtcaacgcagcagacgcggcggccctcg |
| | | agcacgacaaggcctacgaccagcagctcaaggccggagacaacccgtacctcaa |
| | | gtacaaccacgccgacgccgagttccaggagcggctcaaagaagatacgtctttt |
| | | gggggcaacctcgggcgagcagtcttccaggccaaaaagaggcttcttgaacctc |
| | | ttggtctggttgaggaagcggctaagacggctcctggaaagaagaggcctgtaga |
| | | gcagtctcctcaggaaccggactcctccgcgggtattggcaaatcgggtgcacag |
| | | cccgctaaaaagagactcaatttcggtcagactggcgacacagagtcagtcccag |
| | | accctcaaccaatcggagaacctcccgcagccccctcaggtgtgggatctcttac |
| | | aatggcttcaggtggtggcgcaccagtggcagacaataacgaaggtgccgatgga |
| | | gtgggtagttcctcgggaaattggcattgcgattcccaatggctgggggacagag |
| | | tcatcaccaccagcacccgaacctgggccctgcccacctacaacaatcacctcta |
| | | caagcaaatctccaacagcacatctggaggatcttcaaatgacaacgcctacttc |
| | | ggctacagcaccccctgggggtattttgacttcaacagattccactgccacttct |
| | | caccacgtgactggcagcgactcatcaacaacaactggggattccggcctaagcg |
| | | actcaacttcaagctcttcaacattcaggtcaaagaggttacggacaacaatgga |
| | | gtcaagaccatcgccaataaccttaccagcacggtccaggtcttcacggactcag |
| | | actatcagctcccgtacgtgctcgggtcggctcacgagggctgcctcccgccgtt |
| | | cccagcggacgttttcatgattcctcagtacgggtatctgacgcttaatgatgga |
| | | agccaggccgtgggtcgttcgtccttttactgcctggaatatttcccgtcgcaaa |
| | | tgctaagaacgggtaacaacttccagttcagctacgagtttgagaacgtaccttt |
| | | ccatagcagctacgctcacagccaaagcctggaccgactaatgaatccactcatc |
| | | gaccaatacttgtactatctctcaaagactattaacggttctggacagaatcaac |
| | | aaacgctaaaattcagtgtggccggacccagcaacatggctgtccagggaagaaa |
| | | ctacatacctggacccagctaccgacaacaacgtgtctcaaccactgtgactcaa |
| | | aacaacaacagcgaatttgcttggcctggagcttcttcttgggctctcaatggac |
| | | gtaatagcttgatgaatcctggacctgctatggccagccacaaagaaggagagga |
| | | ccgtttctttcctttgtctggatctttaatttttggcaaacaaggaactggaaga |
| | | gacaacgtggatgcggacaaagtcatgataaccaacgaagaagaaattaaaacta |
| | | ctaacccggtagcaacggagtcctatggacaagtggccacaaaccaccagagtgc |
| | | gcaggcgtattcgacggatgagaggatgcaggcgcagaccggctgggttcaaaac |
| | | caaggaatacttccgggtatggtttggcaggacagagatgtgtacctgcaaggac |
| | | ccatttgggccaaaattcctcacacggacggcaactttcacccttctccgctgat |
| | | gggagggtttggaatgaagcacccgcctcctcagatcctcatcaaaaacacacct |
| | | gtacctgcCgatcctccaacggccttcaacaaggacaagctgaactctttcatca |
| | | cccagtattctactggccaagtcagcgtggagatcgagtgggagctgcagaagga |
| | | aaacagcaagcgGtggaacccggagatccagtacacttccaactattacaagtct |
| | | aataatgttgaatttgctgttaatactgaaggtgtatatagtgaaccccgcccca |
| | | ttggcaccagatacctgactcgtaatctgtaa |
| TTD-011 | 3634 | atggctgccgatggttatcttccagattggctcgaggacaaccttagtgaaggaa |
| 7mer | | ttcgcgagtggtgggctttgaaacctggagcccctcaacccaaggcaaatcaaca |
| peptide | | acatcaagacaacgctcgaggtcttgtgcttccgggttacaaataccttggaccc |
| underlined | | ggcaacggactcgacaagggggagccggtcaacgcagcagacgcggcggccctcg |
| | | agcacgacaaggcctacgaccagcagctcaaggccggagacaacccgtacctcaa |
| | | gtacaaccacgccgacgccgagttccaggagcggctcaaagaagatacgtctttt |
| | | gggggcaacctcgggcgagcagtcttccaggccaaaaagaggcttcttgaacctc |
| | | ttggtctggttgaggaagcggctaagacggctcctggaaagaagaggcctgtaga |
| | | gcagtctcctcaggaaccggactcctccgcgggtattggcaaatcgggtgcacag |
| | | cccgctaaaaagagactcaatttcggtcagactggcgacacagagtcagtcccag |
| | | accctcaaccaatcggagaacctcccgcagccccctcaggtgtgggatctcttac |
| | | aatggcttcaggtggtggcgcaccagtggcagacaataacgaaggtgccgatgga |
| | | gtgggtagttcctcgggaaattggcattgcgattcccaatggctgggggacagag |
| | | tcatcaccaccagcacccgaacctgggccctgcccacctacaacaatcacctcta |
| | | caagcaaatctccaacagcacatctggaggatcttcaaatgacaacgcctacttc |
| | | ggctacagcaccccctgggggtattttgacttcaacagattccactgccacttct |
| | | caccacgtgactggcagcgactcatcaacaacaactggggattccggcctaagcg |
| | | actcaacttcaagctcttcaacattcaggtcaaagaggttacggacaacaatgga |
| | | gtcaagaccatcgccaataaccttaccagcacggtccaggtcttcacggactcag |
| | | actatcagctcccgtacgtgctcgggtcggctcacgagggctgcctcccgccgtt |
| | | cccagcggacgttttcatgattcctcagtacgggtatctgacgcttaatgatgga |
| | | agccaggccgtgggtcgttcgtccttttactgcctggaatatttcccgtcgcaaa |
| | | tgctaagaacgggtaacaacttccagttcagctacgagtttgagaacgtaccttt |
| | | ccatagcagctacgctcacagccaaagcctggaccgactaatgaatccactcatc |
| | | gaccaatacttgtactatctctcaaagactattaacggttctggacagaatcaac |
| | | aaacgctaaaattcagtgtggccggacccagcaacatggctgtccagggaagaaa |
| | | ctacatacctggacccagctaccgacaacaacgtgtctcaaccactgtgactcaa |
| | | aacaacaacagcgaatttgcttggcctggagcttcttcttgggctctcaatggac |
| | | gtaatagcttgatgaatcctggacctgctatggccagccacaaagaaggagagga |
| | | ccgtttctttcctttgtctggatctttaatttttggcaaacaaggaactggaaga |
| | | gacaacgtggatgcggacaaagtcatgataaccaacgaagaagaaattaaaacta |
| | | ctaacccggtagcaacggagtcctatggacaagtggccacaaaccaccagagtgc |
| | | gcaggcgtattcgacggatgagaggaagcaggcgcagaccggctgggttcaaaac |
| | | caaggaatacttccgggtatggtttggcaggacagagatgtgtacctgcaaggac |
| | | ccatttgggccaaaattcctcacacggacggcaactttcacccttctccgctgat |
| | | gggagggtttggaatgaagcacccgcctcctcagatcctcatcaaaaacacacct |
| | | gtacctgcCgatcctccaacggccttcaacaaggacaagctgaactctttcatca |
| | | cccagtattctactggccaagtcagcgtggagatcgagtgggagctgcagaagga |
| | | aaacagcaagcgGtggaacccggagatccagtacacttccaactattacaagtct |
| | | aataatgttgaatttgctgttaatactgaaggtgtatatagtgaaccccgcccca |
| | | ttggcaccagatacctgactcgtaatctgtaa |
| TTD-012 | 3635 | atggctgccgatggttatcttccagattggctcgaggacaaccttagtgaaggaa |
| 7mer | | ttcgcgagtggtgggctttgaaacctggagcccctcaacccaaggcaaatcaaca |
| peptide | | acatcaagacaacgctcgaggtcttgtgcttccgggttacaaataccttggaccc |
| underlined | | ggcaacggactcgacaagggggagccggtcaacgcagcagacgcggcggccctcg |
| | | agcacgacaaggcctacgaccagcagctcaaggccggagacaacccgtacctcaa |
| | | gtacaaccacgccgacgccgagttccaggagcggctcaaagaagatacgtctttt |
| | | gggggcaacctcgggcgagcagtcttccaggccaaaaagaggcttcttgaacctc |
| | | ttggtctggttgaggaagcggctaagacggctcctggaaagaagaggcctgtaga |
| | | gcagtctcctcaggaaccggactcctccgcgggtattggcaaatcgggtgcacag |
| | | cccgctaaaaagagactcaatttcggtcagactggcgacacagagtcagtcccag |
| | | accctcaaccaatcggagaacctcccgcagccccctcaggtgtgggatctcttac |
| | | aatggcttcaggtggtggcgcaccagtggcagacaataacgaaggtgccgatgga |
| | | gtgggtagttcctcgggaaattggcattgcgattcccaatggctgggggacagag |
| | | tcatcaccaccagcacccgaacctgggccctgcccacctacaacaatcacctcta |
| | | caagcaaatctccaacagcacatctggaggatcttcaaatgacaacgcctacttc |
| | | ggctacagcaccccctgggggtattttgacttcaacagattccactgccacttct |
| | | caccacgtgactggcagcgactcatcaacaacaactggggattccggcctaagcg |
| | | actcaacttcaagctcttcaacattcaggtcaaagaggttacggacaacaatgga |
| | | gtcaagaccatcgccaataaccttaccagcacggtccaggtcttcacggactcag |
| | | actatcagctcccgtacgtgctcgggtcggctcacgagggctgcctcccgccgtt |
| | | cccagcggacgttttcatgattcctcagtacgggtatctgacgcttaatgatgga |
| | | agccaggccgtgggtcgttcgtccttttactgcctggaatatttcccgtcgcaaa |
| | | tgctaagaacgggtaacaacttccagttcagctacgagtttgagaacgtaccttt |
| | | ccatagcagctacgctcacagccaaagcctggaccgactaatgaatccactcatc |
| | | gaccaatacttgtactatctctcaaagactattaacggttctggacagaatcaac |
| | | aaacgctaaaattcagtgtggccggacccagcaacatggctgtccagggaagaaa |
| | | ctacatacctggacccagctaccgacaacaacgtgtctcaaccactgtgactcaa |
| | | aacaacaacagcgaatttgcttggcctggagcttcttcttgggctctcaatggac |
| | | gtaatagcttgatgaatcctggacctgctatggccagccacaaagaaggagagga |
| | | ccgtttctttcctttgtctggatctttaatttttggcaaacaaggaactggaaga |
| | | gacaacgtggatgcggacaaagtcatgataaccaacgaagaagaaattaaaacta |
| | | ctaacccggtagcaacggagtcctatggacaagtggccacaaaccaccagagtgc |
| | | acaggcttatgtttcgtctgttaagatgcaggcgcagaccggctgggttcaaaac |
| | | caaggaatacttccgggtatggtttggcaggacagagatgtgtacctgcaaggac |
| | | ccatttgggccaaaattcctcacacggacggcaactttcacccttctccgctgat |
| | | gggagggtttggaatgaagcacccgcctcctcagatcctcatcaaaaacacacct |
| | | gtacctgcCgatcctccaacggccttcaacaaggacaagctgaactctttcatca |
| | | cccagtattctactggccaagtcagcgtggagatcgagtgggagctgcagaagga |
| | | aaacagcaagcgGtggaacccggagatccagtacacttccaactattacaagtct |
| | | aataatgttgaatttgctgttaatactgaaggtgtatatagtgaaccccgcccca |
| | | ttggcaccagatacctgactcgtaatctgtaa |
| TTD-013 | 4 | ATGGCTGCCGATGGTTATCTTCCAGATTGGCTCGAGGACAACCTTAGTGAAGGAATTCGC |
| | | GAGTGGTGGGCTTTGAAACCTGGAGCCCCTCAACCCAAGGCAAATCAACAACATCAAGAC |
| | | AACGCTCGAGGTCTTGTGCTTCCGGGTTACAAATACCTTGGACCCGGCAACGGACTCGAC |
| | | AAGGGGGAGCCGGTCAACGCAGCAGACGCGGCGGCCCTCGAGCACGACAAGGCCTACGAC |
| | | CAGCAGCTCAAGGCCGGAGACAACCCGTACCTCAAGTACAACCACGCCGACGCCGAGTTC |
| | | CAGGAGCGGCTCAAAGAAGATACGTCTTTTGGGGGCAACCTCGGGCGAGCAGTCTTCCAG |
| | | GCCAAAAAGAGGCTTCTTGAACCTCTTGGTCTGGTTGAGGAAGCGGCTAAGACGGCTCCT |
| | | GGAAAGAAGAGGCCTGTAGAGCAGTCTCCTCAGGAACCGGACTCCTCCGCGGGTATTGGC |
| | | AAATCGGGTGCACAGCCCGCTAAAAAGAGACTCAATTTCGGTCAGACTGGCGACACAGAG |
| | | TCAGTCCCAGACCCTCAACCAATCGGAGAACCTCCCGCAGCCCCCTCAGGTGTGGGATCT |
| | | CTTACAATGGCTTCAGGTGGTGGCGCACCAGTGGCAGACAATAACGAAGGTGCCGATGGA |
| | | GTGGGTAGTTCCTCGGGAAATTGGCATTGCGATTCCCAATGGCTGGGGGACAGAGTCATC |
| | | ACCACCAGCACCCGAACCTGGGCCCTGCCCACCTACAACAATCACCTCTACAAGCAAATC |
| | | TCCAACAGCACATCTGGAGGATCTTCAAATGACAACGCCTACTTCGGCTACAGCACCCCC |
| | | TGGGGGTATTTTGACTTCAACAGATTCCACTGCCACTTCTCACCACGTGACTGGCAGCGA |
| | | CTCATCAACAACAACTGGGGATTCCGGCCTAAGCGACTCAACTTCAAGCTCTTCAACATT |
| | | CAGGTCAAAGAGGTTACGGACAACAATGGAGTCAAGACCATCGCCAATAACCTTACCAGC |
| | | ACGGTCCAGGTCTTCACGGACTCAGACTATCAGCTCCCGTACGTGCTCGGGTCGGCTCAC |
| | | GAGGGCTGCCTCCCGCCGTTCCCAGCGGACGTTTTCATGATTCCTCAGTACGGGTATCTG |
| | | ACGCTTAATGATGGAAGCCAGGCCGTGGGTCGTTCGTCCTTTTACTGCCTGGAATATTTC |
| | | CCGTCGCAAATGCTAAGAACGGGTAACAACTTCCAGTTCAGCTACGAGTTTGAGAACGTA |
| | | CCTTTCCATAGCAGCTACGCTCACAGCCAAAGCCTGGACCGACTAATGAATCCACTCATC |
| | | GACCAATACTTGTACTATCTCTCAAAGACTATTAACGGTTCTGGACAGAATCAACAAACG |
| | | CTAAAATTCAGTGTGGCCGGACCCAGCAACATGGCTGTCCAGGGAAGAAACTACATACCT |
| | | GGACCCAGCTACCGACAACAACGTGTCTCAACCACTGTGACTCAAAACAACAACAGCGAA |
| | | TTTGCTTGGCCTGGAGCTTCTTCTTGGGCTCTCAATGGACGTAATAGCTTGATGAATCCT |
| | | GGACCTGCTATGGCCAGCCACAAAGAAGGAGAGGACCGTTTCTTTCCTTTGTCTGGATCT |
| | | TTAATTTTTGGCAAACAAGGAACTGGAAGAGACAACGTGGATGCGGACAAAGTCATGATA |
| | | ACCAACGAAGAAGAAATTAAAACTACTAACCCGGTAGCAACGGAGTCCTATGGACAAGTG |
| | | GCCACAAACCACCAGAGTccgcttaatggtgccgtccatctttatGCTCAGGCGCAGACC |
| | | GGCTGGGTTccgAACCAAGGAATACTTCCGGGTATGGTTTGGCAGGACAGAGATGTGTAC |
| | | CTGCAAGGACCCATTTGGGCCAAAATTCCTCACACGGACGGCAACTTTCACCCTTCTCCG |
| | | CTGATGGGAGGGTTTGGAATGAAGCACCCGCCTCCTCAGATCCTCATCAAAAACACACCT |
| | | GTACCTGCCGATCCTCCAACGGCCTTCAACAAGGACAAGCTGAACTCTTTCATCACCCAG |
| | | TATTCTACTGGCCAAGTCAGCGTGGAGATCGAGTGGGAGCTGCAGAAGGAAAACAGCAAG |
| | | CGGTGGAACCCGGAGATCCAGTACACTTCCAACTATTACAAGTCTAATAATGTTGAATTT |
| | | GCTGTTAATACTGAAGGTGTATATAGTGAACCCCGCCCCATTGGCACCAGATACCTGACT |
| | | CGTAATCTGTAA |
| TTD-014 | 7 | ATGGCTGCCGATGGTTATCTTCCAGATTGGCTCGAGGACAACCTTAGTGAAGGAATTCGC |
| | | GAGTGGTGGGCTTTGAAACCTGGAGCCCCTCAACCCAAGGCAAATCAACAACATCAAGAC |
| | | AACGCTCGAGGTCTTGTGCTTCCGGGTTACAAATACCTTGGACCCGGCAACGGACTCGAC |
| | | AAGGGGGAGCCGGTCAACGCAGCAGACGCGGCGGCCCTCGAGCACGACAAGGCCTACGAC |
| | | CAGCAGCTCAAGGCCGGAGACAACCCGTACCTCAAGTACAACCACGCCGACGCCGAGTTC |
| | | CAGGAGCGGCTCAAAGAAGATACGTCTTTTGGGGGCAACCTCGGGCGAGCAGTCTTCCAG |
| | | GCCAAAAAGAGGCTTCTTGAACCTCTTGGTCTGGTTGAGGAAGCGGCTAAGACGGCTCCT |
| | | GGAAAGAAGAGGCCTGTAGAGCAGTCTCCTCAGGAACCGGACTCCTCCGCGGGTATTGGC |
| | | AAATCGGGTGCACAGCCCGCTAAAAAGAGACTCAATTTCGGTCAGACTGGCGACACAGAG |
| | | TCAGTCCCAGACCCTCAACCAATCGGAGAACCTCCCGCAGCCCCCTCAGGTGTGGGATCT |
| | | CTTACAATGGCTTCAGGTGGTGGCGCACCAGTGGCAGACAATAACGAAGGTGCCGATGGA |
| | | GTGGGTAGTTCCTCGGGAAATTGGCATTGCGATTCCCAATGGCTGGGGGACAGAGTCATC |
| | | ACCACCAGCACCCGAACCTGGGCCCTGCCCACCTACAACAATCACCTCTACAAGCAAATC |
| | | TCCAACAGCACATCTGGAGGATCTTCAAATGACAACGCCTACTTCGGCTACAGCACCCCC |
| | | TGGGGGTATTTTGACTTCAACAGATTCCACTGCCACTTCTCACCACGTGACTGGCAGCGA |
| | | CTCATCAACAACAACTGGGGATTCCGGCCTAAGCGACTCAACTTCAAGCTCTTCAACATT |
| | | CAGGTCAAAGAGGTTACGGACAACAATGGAGTCAAGACCATCGCCAATAACCTTACCAGC |
| | | ACGGTCCAGGTCTTCACGGACTCAGACTATCAGCTCCCGTACGTGCTCGGGTCGGCTCAC |
| | | GAGGGCTGCCTCCCGCCGTTCCCAGCGGACGTTTTCATGATTCCTCAGTACGGGTATCTG |
| | | ACGCTTAATGATGGAAGCCAGGCCGTGGGTCGTTCGTCCTTTTACTGCCTGGAATATTTC |
| | | CCGTCGCAAATGCTAAGAACGGGTAACAACTTCCAGTTCAGCTACGAGTTTGAGAACGTA |
| | | CCTTTCCATAGCAGCTACGCTCACAGCCAAAGCCTGGACCGACTAATGAATCCACTCATC |
| | | GACCAATACTTGTACTATCTCTCAAAGACTATTAACGGTTCTGGACAGAATCAACAAACG |
| | | CTAAAATTCAGTGTGGCCGGACCCAGCAACATGGCTGTCCAGGGAAGAAACTACATACCT |
| | | GGACCCAGCTACCGACAACAACGTGTCTCAACCACTGTGACTCAAAACAACAACAGCGAA |
| | | TTTGCTTGGCCTGGAGCTTCTTCTTGGGCTCTCAATGGACGTAATAGCTTGATGAATCCT |
| | | GGACCTGCTATGGCCAGCCACAAAGAAGGAGAGGACCGTTTCTTTCCTTTGTCTGGATCT |
| | | TTAATTTTTGGCAAACAAGGAACTGGAAGAGACAACGTGGATGCGGACAAAGTCATGATA |
| | | ACCAACGAAGAAGAAATTAAAACTACTAACCCGGTAGCAACGGAGTCCTATGGACAgGTc |
| | | GCtACGAATCATCAGTCTCCGCTGAATGGTGCGGTGCATCTGTATGCGCAGGCGCAGCTG |
| | | TCTCCGGTGAAGAATcaaggaatacttccgggtatgGTTTGGCAGGACAGAGATGTGTAC |
| | | CTGCAAGGACCCATTTGGGCCAAAATTCCTCACACGGACGGCAACTTTCACCCTTCTCCG |
| | | CTGATGGGAGGGTTTGGAATGAAGCACCCGCCTCCTCAGATCCTCATCAAAAACACACCT |
| | | GTACCTGCCGATCCTCCAACGGCCTTCAACAAGGACAAGCTGAACTCTTTCATCACCCAG |
| | | TATTCTACTGGCCAAGTCAGCGTGGAGATCGAGTGGGAGCTGCAGAAGGAAAACAGCAAG |
| | | CGGTGGAACCCGGAGATCCAGTACACTTCCAACTATTACAAGTCTAATAATGTTGAATTT |
| | | GCTGTTAATACTGAAGGTGTATATAGTGAACCCCGCCCCATTGGCACCAGATACCTGACT |
| | | CGTAATCTGTAA |

[1297] In some embodiments, an AAV capsid polypeptide, e.g., an AAV capsid variant, described herein comprises the amino acid sequence of any one of SEQ ID NOs: 3636-3647, or an amino acid sequence with at least 80% (e.g., at least about 85, 90, 95, 96, 97, 98, or 99%) sequence identity thereto. In some embodiments, an AAV capsid variant described herein comprises the amino acid sequence of SEQ ID NO: 3636, or an amino acid sequence with at least 80% (e.g., at least about 85, 90, 95, 96, 97, 98, or 99%) sequence identity thereto. In some embodiments, an AAV capsid variant described herein comprises the amino acid sequence of SEQ ID NO: 3639, or an amino acid sequence with at least 80% (e.g., at least about 85, 90, 95, 96, 97, 98, or 99%) sequence identity thereto.

[1298] In some embodiments, the polynucleotide encoding an AAV capsid polypeptide, e.g., AAV capsid variant, described herein comprises the nucleotide sequence of any one of SEQ ID NOs: 3623-3635, or a nucleotide sequence with at least 80% (e.g., at least about 85, 90, 95, 96, 97, 98, or 99%) sequence identity thereto. In some embodiments, the polynucleotide encoding an AAV capsid variant described herein comprises the nucleotide sequence of SEQ ID NO: 3623, or a nucleotide sequence with at least 80% (e.g., at least about 85, 90, 95, 96, 97, 98, or 99%) sequence identity thereto. In some embodiments, the polynucleotide encoding an AAV capsid variant described herein comprises the nucleotide sequence of SEQ ID NO: 3627, or a nucleotide sequence with at least 80% (e.g., at least about 85, 90, 95, 96, 97, 98, or 99%) sequence identity thereto. In some embodiments, the nucleic acid sequence encoding an AAV capsid polypeptide, e.g., an AAV capsid variant, described herein is codon optimized.

[1299] In some embodiments, the AAV capsid polypeptide, e.g., the AAV capsid variant, comprises a VP2 protein comprising the amino acid sequence corresponding to positions 138-743, of any one of SEQ ID NOs: 3636-3647, or a sequence with at least 80% (e.g., at least about 85, 90, 95, 96, 97, 98, or 99%) sequence identity thereto. In some embodiments, the AAV capsid comprises a VP3 protein comprising the amino acid sequence corresponding to positions 203-743, of any one of SEQ ID NOs: 3636-3647, or a sequence with at least 80% (e.g., at least about 85, 90, 95, 96, 97, 98, or 99%) sequence identity thereto.

[1300] In some embodiments, the AAV capsid polypeptide, e.g., the AAV capsid variant, e.g., an AAV capsid variant described herein, comprises the amino acid sequence of any one of SEQ ID NOs: 3636-3647, or an amino acid sequence with at least 80% (e.g., at least about 85, 90, 95, 96, 97, 98, or 99%) sequence identity thereto. In some embodiments, the AAV capsid polypeptide, e.g., the AAV capsid variant, e.g., an AAV capsid variant described herein, comprises an amino acid sequence comprising at least one, two, or three modifications, substitutions (e.g., conservative substitutions), insertions, or deletions, but not more than 30, 20 or 10 modifications, substitutions (e.g., conservative substitutions), insertions, or deletions relative to the amino acid sequence of any one of SEQ ID NOs: 3636-3647. In some embodiments, the AAV capsid polypeptide, e.g., the AAV capsid variant, e.g., an AAV capsid variant described herein, comprises an amino acid sequence having at least one, two, or three but no more than 30, 20, or 10 different amino acids relative to the amino acid sequence of any one of SEQ ID NOs: 3636-3647.

[1301] In some embodiments, the AAV capsid polypeptide, e.g., the AAV capsid variant, e.g., an AAV capsid variant described herein, comprises the amino acid sequence of SEQ ID NO: 3636, or an amino acid sequence with at least 80% (e.g., at least about 85, 90, 95, 96, 97, 98, or 99%) sequence identity thereto. In some embodiments, the AAV capsid polypeptide, e.g., the AAV capsid variant, e.g., an AAV capsid variant described herein, comprises an amino acid sequence comprising at least one, two, or three modifications, substitutions (e.g., conservative substitutions), insertions, or deletions, but not more than 30, 20 or 10 modifications, substitutions (e.g., conservative substitutions), insertions, or deletions relative to the amino acid sequence of SEQ ID NO: 3636. In some embodiments, the AAV capsid polypeptide, e.g., the AAV capsid variant, e.g., an AAV capsid variant described herein, comprises an amino acid sequence having at least one, two, or three but no more than 30, 20, or 10 different amino acids relative to the amino acid sequence of SEQ ID NO: 3636.

[1302] In some embodiments, an AAV capsid polypeptide, e.g., an AAV capsid variant, described herein has an increased tropism for a CNS cell or tissue, e.g., a brain cell, brain tissue, spinal cord cell, or spinal cord tissue, relative to the tropism of a reference sequence comprising the amino acid sequence of SEQ ID NO: 138.

[1303] In some embodiments, an AAV capsid polypeptide, e.g., an AAV capsid variant, described herein transduces a brain region, e.g., selected from dentate nucleus, cerebellar cortex, cerebral cortex, brain stem, hippocampus, thalamus and putamen. In some embodiments, the level of transduction of said brain region is at least 5, 10, 50, 100, 200, 500, 1,000, 2,000, 5,000, or 10,000-fold greater as compared to a reference sequence of SEQ ID NO: 138.

[1304] In some embodiments, an AAV capsid polypeptide, e.g., an AAV capsid variant, described herein is enriched at least about 5, 6, 7, 8, 9, or 10-fold, in the brain compared to a reference sequence of SEQ ID NO: 138. In some embodiments, an AAV capsid variant described herein is enriched at least about 20, 30, 40, or 50-fold in the brain compared to a reference sequence of SEQ ID NO: 138. In some embodiments, an AAV capsid variant described herein is enriched at least about 100, 200, 300, or 400-fold in the brain compared to a reference sequence of SEQ ID NO: 138.

[1305] In some embodiments, an AAV capsid polypeptide, e.g., an AAV capsid variant, described herein delivers an increased level of viral genomes to a brain region. In some embodiments, the level of viral genomes is increased by at least 5, 10, 20, 30, 40 or 50-fold, as compared to a reference sequence of SEQ ID NO: 138. In some embodiments, the brain region comprises a frontal cortex, sensory cortex, motor cortex, putamen, thalamus, cerebellar cortex, dentate nucleus, caudate, and/or hippocampus.

[1306] In some embodiments, an AAV capsid polypeptide, e.g., an AAV capsid variant, described herein delivers an increased level of a payload to a brain region. In some embodiments, the level of the payload is increased by at least 5, 10, 50, 100, 200, 500, 1,000, 2,000, 5,000, or 10,000-fold, as compared to a reference sequence of SEQ ID NO: 138. In some embodiments, the brain region comprises a frontal cortex, sensory cortex, motor cortex, putamen, thalamus, cerebellar cortex, dentate nucleus, caudate, and/or hippocampus.

[1307] In some embodiments, an AAV capsid polypeptide, e.g., an AAV capsid variant, described herein delivers an increased level of a payload to a spinal cord region. In some embodiments, the level of the payload is increased by at least 10, 20, 50, 100, 200, 300, 400, 500, 600, 700, 800 or 900-fold, as compared to a reference sequence of SEQ ID NO: 138. In some embodiments, the spinal cord region comprises a cervical, thoracic, and/or lumbar region.

[1308] In some embodiments, an AAV capsid polypeptide, e.g., an AAV capsid variant, described herein shows preferential transduction in a brain region relative to the transduction in the dorsal root ganglia (DRG).

[1309] In some embodiments, an AAV capsid polypeptide, e.g., an AAV capsid variant, described herein has an increased tropism for a muscle cell or tissue, e.g., a heart cell or tissue, relative to the tropism of a reference sequence comprising the amino acid sequence of SEQ ID NO: 138. In some embodiments, the AAV capsid variant delivers an increased level of a payload to a muscle region. In some embodiments, the payload is increased by at least 10, 15, 20, 30, or 40-fold, as compared to a reference sequence of SEQ ID NO: 138. In some embodiments, the muscle region comprises a heart muscle, quadriceps muscle, and/or a diaphragm muscle region. In some embodiments, the muscle region comprises a heart muscle region, e.g., a heart atrium muscle region or a heart ventricle muscle region.

[1310] In some embodiments, an AAV capsid polypeptide, e.g., an AAV capsid variant described herein results in greater than 1, 2, 5, 10, 20, 30, 40, 50, or 100 reads per sample, e.g., when analyzed by an NGS sequencing assay.

[1311] In some embodiments, an AAV capsid polypeptide, e.g., an AAV capsid variant, of the present disclosure has decreased tropism for the liver. In some embodiments, an AAV capsid variant comprises a modification, e.g., substitution (e.g., conservative substitution), insertion, or deletion, that results in reduced tropism (e.g., de-targeting) and/or activity in the liver. In some embodiments, the reduced tropism in the liver is compared to an otherwise similar capsid that does not comprise the modification, e.g., a wild-type capsid polypeptide. In some embodiments, an AAV capsid variant described comprises a modification, e.g., substitution (e.g., conservative substitution), insertion, or deletion, that results in one or more of the following properties: (1) reduced tropism in the liver; (2) de-targeted expression in the liver; (3) reduced activity in the liver; and/or (4) reduced binding to galactose. In some embodiments, the reduction in any one, or all of properties (1)-(3) is compared to an otherwise similar AAV capsid variant that does not comprise the modification. Exemplary modifications are provided in WO 2018/119330; Pulicherla et al. (2011) Mol. Ther. 19(6): 1070-1078; Adachi et al. (2014) Nature Communications 5(3075), DOI: 10.1038/ncomms4075; and Bell et al. (2012) J. Virol. 86(13): 7326-33; the contents of which are hereby incorporated by reference in their entirety. In some embodiments, the AAV capsid variant comprises a modification e.g., substitution (e.g., conservative substitution), insertion, or deletion, at position N470 (e.g., N470A), D271 (e.g., D271A), N272 (e.g., N297A), Y446 (e.g., Y446A), N498 (e.g., N498Y or N498I), W503 (e.g., W530R or W530A), L620 (e.g., L620F), or a combination thereof, relative to a reference sequence numbered according to SEQ ID NO: 138. In some embodiments, the AAV capsid variant comprises one, two, three, four, five or all of an amino acid other than N at position 470 (e.g., A), an amino acid other than D at position 271 (e.g., A), an amino acid other than N at position 272 (e.g., A), an amino acid other than Y at position 446 (e.g., A), and amino acid other than N at position 498/(e.g., Y or I), and amino acid other than W at position 503 (e.g., R or A), and amino acid other than L at position 620 (e.g., F), relative to a reference sequence numbered according to SEQ ID NO: 138. In some embodiments, the AAV capsid variant comprises a modification e.g., substitution (e.g., conservative substitution), insertion, or deletion, at position N470 (e.g., N470A), D271 (e.g., D271A), N272 (e.g., N297A), Y446 (e.g., Y446A), and W503 (e.g., W530R or W530A), relative to a reference sequence numbered according to SEQ ID NO: 138. In some embodiments, the AAV capsid variant comprises a modification e.g., substitution (e.g., conservative substitution), insertion, or deletion, at N498 (e.g., N498Y) and L620 (e.g., L620F).

[1312] In some embodiments, an AAV capsid variant comprised herein comprises a modification as described in Adachi et al. (2014) Nature Communications 5(3075), DOI: 10.1038/ncomms4075, the contents of which are hereby incorporated by reference in its entirety. Exemplary modifications that alter or do not alter tissue transduction in at least the brain, liver, heart, lung, and/or kidney can be found in Supplementary Data 2 showing the AAV Barcode-Seq data obtained with AAV9-AA-VBCLib of Adachi et al. (supra), the contents of which are hereby incorporated by reference in its entirety.

[1313] In some embodiments, an, AAV capsid polypeptide, e.g., an AAV capsid variant, of the present disclosure is isolated, e.g., recombinant. In some embodiments, a polynucleotide encoding an AAV capsid polypeptide, e.g., an AAV capsid variant, of the present disclosure is isolated, e.g., recombinant.

[1314] In some embodiments, the AAV capsid polypeptide, e.g., the AAV capsid variant, e.g., an AAV capsid variant described herein, comprises the amino acid sequence of any one of SEQ ID NOs: 3636-3647, or an amino acid sequence with at least 80% (e.g., at least about 85, 90, 95, 96, 97, 98, or 99%) sequence identity thereto. In some embodiments, the AAV capsid polypeptide, e.g., the AAV capsid variant, e.g., an AAV capsid variant described herein, comprises an amino acid sequence comprising at least one, two, or three modifications, substitutions (e.g., conservative substitutions), insertions, or deletions, but not more than 30, 20 or 10 modifications, substitutions (e.g., conservative substitutions), insertions, or deletions relative to the amino acid sequence of any one of SEQ ID NOs: 3636-3647. In some embodiments, the AAV capsid polypeptide, e.g., the AAV capsid variant, e.g., an AAV capsid variant described herein, comprises an amino acid sequence having at least one, two, or three but no more than 30, 20, or 10 different amino acids relative to the amino acid sequence of any one of SEQ ID NOs: 3636-3647.

[1315] In some embodiments, the AAV capsid polypeptide, e.g., the AAV capsid variant, e.g., an AAV capsid variant described herein, comprises the amino acid sequence of SEQ ID NO: 3636, or an amino acid sequence with at least 80% (e.g., at least about 85, 90, 95, 96, 97, 98, or 99%) sequence identity thereto. In some embodiments, the AAV capsid polypeptide, e.g., the AAV capsid variant, e.g., an AAV capsid variant described herein, comprises an amino acid sequence comprising at least one, two, or three modifications, substitutions (e.g., conservative substitutions), insertions, or deletions, but not more than 30, 20 or 10 modifications, substitutions (e.g., conservative substitutions), insertions, or deletions relative to the amino acid sequence of SEQ ID NO: 3636. In some embodiments, the AAV capsid polypeptide, e.g., the AAV capsid variant, e.g., an AAV capsid variant described herein, comprises an amino acid sequence having at least one, two, or three but no more than 30, 20, or 10 different amino acids relative to the amino acid sequence of SEQ ID NO: 3636.

[1316] In some embodiments, an, AAV capsid polypeptide, e.g., an AAV capsid variant, of the present disclosure is isolated, e.g., recombinant. In some embodiments, a polynucleotide encoding an AAV capsid polypeptide, e.g., an AAV capsid variant, of the present disclosure is isolated, e.g., recombinant.

[1317] The present disclosure refers to structural capsid proteins (including VP1, VP2 and VP3) which are encoded by capsid (Cap) genes. These capsid proteins form an outer protein structural shell (i.e. capsid) of a viral vector such as AAV. VP capsid proteins synthesized from Cap polynucleotides generally include a methionine as the first amino acid in the peptide sequence (Met1), which is associated with the start codon (AUG or ATG) in the corresponding Cap nucleotide sequence. However, it is common for a first-methionine (Met1) residue or generally any first amino acid (AA1) to be cleaved off after or during polypeptide synthesis by protein processing enzymes such as Met-aminopeptidases. This “Met/AA-clipping” process often correlates with a corresponding acetylation of the second amino acid in the polypeptide sequence (e.g., alanine, valine, serine, threonine, etc.). Met-clipping commonly occurs with VP1 and VP3 capsid proteins but can also occur with VP2 capsid proteins.

[1318] Where the Met/AA-clipping is incomplete, a mixture of one or more (one, two or three) VP capsid proteins comprising the viral capsid may be produced, some of which may include a Met1/AA1 amino acid (Met+/AA+) and some of which may lack a Met1/AA1 amino acid as a result of Met/AA-clipping (Met−/AA−). For further discussion regarding Met/AA-clipping in capsid proteins, see Jin, et al. Direct Liquid Chromatography/Mass Spectrometry Analysis for Complete Characterization of Recombinant Adeno-Associated Virus Capsid Proteins. Hum Gene Ther Methods. 2017 Oct. 28(5):255-267; Hwang, et al. N-Terminal Acetylation of Cellular Proteins Creates Specific Degradation Signals. Science. 2010 Feb. 19. 327(5968): 973-977; the contents of which are each incorporated herein by reference in their entirety.

[1319] According to the present disclosure, references to capsid proteins is not limited to either clipped (Met−/AA−) or unclipped (Met+/AA+) and may, in context, refer to independent capsid proteins, viral capsids comprised of a mixture of capsid proteins, and/or polynucleotide sequences (or fragments thereof) which encode, describe, produce or result in capsid proteins of the present disclosure. A direct reference to a “capsid protein” or “capsid polypeptide” (such as VP1, VP2 or VP2) may also comprise VP capsid proteins which include a Met1/AA1 amino acid (Met+/AA+) as well as corresponding VP capsid proteins which lack the Met1/AA1 amino acid as a result of Met/AA-clipping (Met−/AA−).

[1320] Further according to the present disclosure, a reference to a specific “SEQ ID NO:” (whether a protein or nucleic acid) which comprises or encodes, respectively, one or more capsid proteins which include a Met1/AA1 amino acid (Met+/AA+) should be understood to teach the VP capsid proteins which lack the Met1/AA1 amino acid as upon review of the sequence, it is readily apparent any sequence which merely lacks the first listed amino acid (whether or not Met1/AA1).

[1321] As a non-limiting example, reference to a VP1 polypeptide sequence which is 736 amino acids in length and which includes a “Met1” amino acid (Met+) encoded by the AUG/ATG start codon may also be understood to teach a VP1 polypeptide sequence which is 735 amino acids in length and which does not include the “Met1” amino acid (Met−) of the 736 amino acid Met+ sequence. As a second non-limiting example, reference to a VP1 polypeptide sequence which is 736 amino acids in length and which includes an “AA1” amino acid (AA1+) encoded by any NNN initiator codon may also be understood to teach a VP1 polypeptide sequence which is 735 amino acids in length and which does not include the “AA1” amino acid (AA1−) of the 736 amino acid AA1+ sequence.

[1322] References to viral capsids formed from VP capsid proteins (such as reference to specific AAV capsid serotypes), can incorporate VP capsid proteins which include a Met1/AA1 amino acid (Met+/AA1+), corresponding VP capsid proteins which lack the Met1/AA1 amino acid as a result of Met/AA1-clipping (Met−/AA1−), and combinations thereof (Met+/AA1+ and Met−/AA1−).

[1323] As a non-limiting example, an AAV capsid serotype can include VP1 (Met+/AA1+), VP1 (Met−/AA1−), or a combination of VP1 (Met+/AA1+) and VP1 (Met−/AA1−). An AAV capsid serotype can also include VP3 (Met+/AA1+), VP3 (Met−/AA1−), or a combination of VP3 (Met+/AA1+) and VP3 (Met−/AA1−); and can also include similar optional combinations of VP2 (Met+/AA1) and VP2 (Met−/AA1−).

[1324] Also provided herein are polynucleotide sequences encoding any of the AAV capsid variants described above and AAV particles, vectors, and cells comprising the same.

### Viral Genome of the AAV Particle

[1325] In some embodiments, an AAV particle as described herein comprising an AAV capsid polypeptide, e.g., AAV capsid variant, described herein, may be used for the delivery of a viral genome to a tissue (e.g., CNS, DRG, and/or muscle). In some embodiments, an AAV particle comprising an AAV capsid polypeptide, e.g., an AAV capsid variant, described herein can be used for delivery of a viral genome to a tissue or cell, e.g., CNS, DRG, or muscle cell or tissue. In some embodiments, an AAV particle of the present disclosure is a recombinant AAV particle. In some embodiments, an AAV particle of the present disclosure is an isolated AAV particle.

[1326] The viral genome may encode any payload, such as but not limited to a polypeptide (e.g., a therapeutic polypeptide), an antibody, an enzyme, an RNAi agent and/or components of a gene editing system. In one embodiment, the AAV particles described herein are used to deliver a payload to cells of the CNS, after intravenous delivery. In another embodiment, the AAV particles described herein are used to deliver a payload to cells of the DRG, after intravenous delivery. In some embodiments, the AAV particles described herein are used to deliver a payload to cells of a muscle, e.g., a heart muscle, after intravenous delivery.

[1327] In some embodiments, a viral genome of an AAV particle comprising an AAV capsid polypeptide, e.g., an AAV capsid variant, as described herein, comprises a nucleic acid comprising a transgene encoding a payload. In some embodiments, the viral genome comprises an inverted terminal repeat (ITR) sequence. In some embodiments, the viral genome comprises two ITR sequences, e.g., one at the 5′ end of the viral genome (e.g., 5′ relative to the encoded payload) and one at the 3′ end of the viral genome (e.g., 3′ relative to the encoded payload). In some embodiments, a viral genome of the AAV particles described herein (e.g., comprising an AAV capsid variant described herein) may comprise a regulatory element (e.g., promoter), untranslated regions (UTR), a miR binding site a polyadenylation sequence (polyA), a filler or stuffer sequence, an intron, and/or a linker sequence, e.g., for enhancing transgene expression.

[1328] In some embodiments, the viral genome components are selected and/or engineered for expression of a payload in a target tissue (e.g., a CNS tissue, a muscle tissue (e.g., heart), or DRG).

### Viral Genome Component: Inverted Terminal Repeats (ITRs)

[1329] In some embodiments, the AAV particle comprising an AAV capsid polypeptide, e.g., an AAV capsid variant, described herein comprises a viral genome comprising an ITR and a transgene encoding a payload. In some embodiment, the viral genome has two ITRs. In some embodiments, the two ITRs flank the nucleotide sequence encoding the payload at the 5′ and 3′ ends. In some embodiments, the ITRs function as origins of replication comprising recognition sites for replication. In some embodiments, the ITRs comprise sequence regions which can be complementary and symmetrically arranged. In some embodiments, the ITRs incorporated into viral genomes as described herein may be comprised of naturally occurring polynucleotide sequences or recombinantly derived polynucleotide sequences.

[1330] In some embodiments, the ITR may be of the same serotype (e.g., a serotype listed in Table 1) as the capsid polypeptide, e.g., capsid variant, selected from any of the known serotypes, or a variant thereof. In some embodiments, the ITR may be of a different serotype than the capsid. In one embodiment, the viral genome comprises two ITR sequence regions, wherein the ITRs are of the same serotype as one another. In another embodiment, the viral genome comprises two ITR sequence regions, wherein the ITRs are of different serotypes. Non-limiting examples include zero, one or both of the ITRs having the same serotype as the capsid. In one embodiment both ITRs of the viral genome of the AAV particle are AAV2 ITRs.

### Viral Genome Component: Promoters

[1331] In one embodiment, the payload region of the viral genome comprises at least one element to enhance the payload target specificity and expression (See e.g., Powell et al. Viral Expression Cassette Elements to Enhance Transgene Target Specificity and Expression in Gene Therapy, 2015; the contents of which are herein incorporated by reference in their entirety). Non-limiting examples of elements to enhance payload target specificity and expression include promoters, endogenous miRNAs, post-transcriptional regulatory elements (PREs), polyadenylation (PolyA) signal sequences and upstream enhancers (USEs), CMV enhancers and introns.

[1332] In some embodiments, an AAV particle comprising an AAV capsid variant described herein comprises a viral genome comprising a nucleic acid comprising a transgene encoding a payload, wherein the transgene is operably linked to a promoter. In some embodiments, the promoter is a species' specific promoter, an inducible promoter, tissue-specific, or cell cycle-specific (Parr et al., Nat. Med. 3:1145-9 (1997); the contents of which are herein incorporated by reference in their entirety).

[1333] In some embodiments the promoter may be naturally occurring or non-naturally occurring. Non-limiting examples of promoters include those from viruses, plants, mammals, or humans. In some embodiments, the promoters may be those from human cells or systems. In some embodiments, the promoter may be truncated or mutated, e.g., a promoter variant.

[1334] In some embodiments, the promoter is a ubiquitous promoter, e.g., capable of expression in multiple tissues. In some embodiments the promoter is a human elongation factor 1α-subunit (EF1α) promoter, the cytomegalovirus (CMV) immediate-early enhancer and/or promoter, the chicken β-actin (CBA) promoter and its derivative CAG, β glucuronidase (GUSB) promoter, or ubiquitin C (UBC) promoter. In some embodiments, the promoter is a cell or tissue specific promoter, e.g., capable of expression in tissues or cells of the central or peripheral nervous systems, regions within (e.g., frontal cortex), and/or sub-sets of cells therein (e.g., excitatory neurons). In some embodiments, the promoter is a cell-type specific promoter capable of expression a payload in excitatory neurons (e.g., glutamatergic), inhibitory neurons (e.g., GABA-ergic), neurons of the sympathetic or parasympathetic nervous system, sensory neurons, neurons of the dorsal root ganglia, motor neurons, or supportive cells of the nervous systems such as microglia, astrocytes, oligodendrocytes, and/or Schwann cells.

[1335] In some embodiments, the promoter is a liver promoter (e.g., hAAT, TBG), skeletal muscle specific promoter (e.g., desmin, MCK, C512), B cell promoter, monocyte promoter, leukocyte promoter, macrophage promoter, pancreatic acinar cell promoter, endothelial cell promoter, lung tissue promoter, and/or cardiac or cardiovascular promoter (e.g., αMHC, cTnT, and CMV-MLC2k).

[1336] In some embodiments, the promoter is a tissue-specific promoter for payload expression in a cell or tissue of the central nervous system. In some embodiments, the promoter is synapsin (Syn) promoter, glutamate vesicular transporter (VGLUT) promoter, vesicular GABA transporter (VGAT) promoter, parvalbumin (PV) promoter, sodium channel Naᵥ 1.8 promoter, tyrosine hydroxylase (TH) promoter, choline acetyltransferase (ChaT) promoter, methyl-CpG binding protein 2 (MeCP2) promoter, Ca²⁺/calmodulin-dependent protein kinase II (CaMKII) promoter, metabotropic glutamate receptor 2 (mGluR2) promoter, neurofilament light (NFL) or heavy (NFH) promoter, neuron-specific enolase (NSE) promoter, β-globin minigene nβ2 promoter, preproenkephalin (PPE) promoter, enkephalin (Enk) promoter, and excitatory amino acid transporter 2 (EAAT2) promoter. In some embodiments, the promoter is a cell-type specific promoter capable of expression in an astrocyte, e.g., a glial fibrillary acidic protein (GFAP) promoter and a EAAT2 promoter. In some embodiments, the promoter is a cell-type specific promoter capable of expression in an oligodendrocyte, e.g., a myelin basic protein (MBP) promoter.

[1337] In some embodiments, the promoter is a GFAP promoter. In some embodiments, the promoter is a synapsin (syn or syn1) promoter, or a fragment thereof.

[1338] In some embodiments, the promoter comprises an insulin promoter or a fragment thereof.

[1339] In some embodiments, the promoter of the viral genome described herein (e.g., comprised within an AAV particle comprising an AAV capsid variant described herein) comprises an EF-1α promoter or variant thereof, e.g., as provided in Table 6. In some embodiments, the EF-1α promoter comprises the nucleotide sequence of any one of SEQ ID NOs: 9000, 9001, 9003, 9004, 9008, 9009, 9011-9020, GCATG, CGTGAG, GT, GCTCCGGT, or GTAAG or any of the sequences provided in Table 6, a nucleotide sequence comprising at least one, two, or three but no more than four modifications, e.g., substitutions, relative to the nucleotide sequence of SEQ ID NOs: 9000-9020, or a nucleotide sequence with at least 70% (e.g., 80, 85%, 90%, 95%, 96%, 97%, 98%, or 99%) sequence identity to any one of SEQ ID NOs: 9000, 9001, 9003, 9004, 9008, 9009, 9011-9020, GCATG, CGTGAG, GT, GCTCCGGT, or GTAAG or any of the sequences provided in Table 6.

TABLE 6
Exemplary Promoter Variants

| | | SEQ ID |
|---|---|---|
| Description | Sequences | NO: |
| EF1a Promoter | CGTGAGGCTCCGGTGCCCGTCAGTGGGCAGAGCGCACATCGCCCACAGTCCCCG | 9000 |
| (intron | AGAAGTTGGGGGGAGGGGTCGGCAATTGAACCGGTGCCTAGAGAAGGTGGCGCG | |
| underlined) | GGGTAAACTGGGAAAGTGATGTCGTGTACTGGCTCCGCCTTTTTCCCGAGGGTG | |
| | GGGGAGAACCGTATATAAGTGCAGTAGTCGCCGTGAACGTTCTTTTTCGCAACG | |
| | GGTTTGCCGCCAGAACACAGGTAAGTGCCGTGTGTGGTTCCCGCGGGCCTGGCC | |
| | TCTTTACGGGTTATGGCCCTTGCGTGCCTTGAATTACTTCCACCTGGCTGCAGT | |
| | ACGTGATTCTTGATCCCGAGCTTCGGGTTGGAAGTGCGGGGGAGAGTTCGAGGC | |
| | CTTGCGCTTAAGGAGCCCCTTCGCCTCGTGCTTGAGTTGAGGCCTGGCCTGGGC | |
| | GCTGGGGCCGCCGCGTGCGAATCTGGTGGCACCTTCGCGCCTGTCTCGCTGCTT | |
| | TCGATAAGTCTCTAGCCATTTAAAATTTTTGATGACCTGCTGCGACGCTTTTTT | |
| | TCTGGCAAGATAGTCTTGTAAATGCGGGCCAAGATCTGCACACTGGTATTTCGG | |
| | TTTTTGGGGCCGCGGGCGGCGACGGGGCCCGTGCGTCCCAGCGCACATGTTCGG | |
| | CGAGGCGGGGCCTGCGAGCGCGGCCACCGAGAATCGGACGGGGGTAGTCTCAAG | |
| | CTGGCCGGCCTGCTCTGGTGCCTGGCCTCGCGCCGCCGTGTATCGCCCCGCCCT | |
| | GGGCGGCAAGGCTGGCCCGGTCGGCACCAGTTGCGTGAGCGGAAAGATGGCCGC | |
| | TTCCCGGCCCTGCTGCAGGGAGCTCAAAATGGAGGACGCGGCGCTCGGGAGAGC | |
| | GGGCGGGTGAGTCACCCACACAAAGGAAAAGGGCCTTTCCGTCCTCAGCCGTCG | |
| | CTTCATGTGACTCCACGGAGTACCGGGCGCCGTCCAGGCACCTCGATTAGTTCT | |
| | CGAGCTTTTGGAGTACGTCGTCTTTAGGTTGGGGGGAGGGGTTTTATGCGATGG | |
| | AGTTTCCCCACACTGAGTGGGTGGAGACTGAAGTTAGGCCAGCTTGGCACTTGA | |
| | TGTAATTCTCCTTGGAATTTGCCCTTTTTGAGTTTGGATCTTGGTTCATTCTCA | |
| | AGCCTCAGACAGTGGTTCAAAGTTTTTTTCTTCCATTTCAGGTGTCGTGA | |
| miniEF1a | GCCCGTCAGTGGGCAGAGCGCACATCGCCCACAGTCCCCGAGAAGTTGGGGGGA | 9001 |
| | GGGGTCGGCAATTGAACCGGTGCCTAGAGAAGGTGGCGCGGGGTAAACTGGGAA | |
| | AGTGATGTCGTGTACTGGCTCCGCCTTTTTCCCGAGGGTGGGGGAGAACCGTAT | |
| | ATAAGTGCAGTAGTCGCCGTGAACGTTCTTTTTCGCAACGGGTTTGCCGCCAGA | |
| | ACACGCGTAAG | |
| Promoter | GCATG | |
| Variant 1 | | |
| Promoter | GGTGGAGAAGAGCATG | 9003 |
| Variant 2 | | |
| Promoter | GTCATCACTGAGGTGGAGAAGAGCATG | 9004 |
| Variant 3 | | |
| Promoter | CGTGAG | |
| Variant 4 | | |
| Promoter | GT | |
| Variant 5 | | |
| Promoter | GCTCCGGT | |
| Variant | | |
| 6 | | |
| Promoter | GCCCGTCAGTGGGCAGAGCGCACATCGCCCACAGTCCCCGAGAAGTTGGGGGGA | 9008 |
| Variant 19 | GGGGTCGGCAATTGAACCGGTGCCTAGAGAAGGTGGCGCGGGGTAAACTGGGAA | |
| | AGTGATGTCGTGTACTGGCTCCGCCTTTTTCCCGAGGGTGGGGGAGAACCGTAT | |
| | ATAAGTGCAGTAGTCGCCGTGAACGTTCTTTTTCGCAACGGGTTTGCCGCCAGA | |
| | ACACAG | |
| Promoter | GCCCGTCAGTGGGCAGAGCGCACATCGCCCACAGTCCCCGAGAAGTTGGGGGGA | 9009 |
| Variant | GGGGTCGGCAATTGAACCGGTGCCTAGAGAAGGTGGCGCGGGGTAAACTGGGAA | |
| 20 | AGTGATGTCGTGTACTGGCTCCGCCTTTTTCCCGAGGGTGGGGGAGAACCGTAT | |
| | ATAAGTGCAGTAGTCGCCGTGAACGTTCTTTTTCGCAACGGGTTTGCCGCCAGA | |
| | ACACGC | |
| Promoter | GTAAG | |
| Variant 7 | | |
| Promoter | GTGCCCGTCAGTGGGCAGAGCGCACATCGCCCACAGTCCCCGAGAAGTTGGGGG | 9011 |
| Variant 8 | GAGGGGTCGGCAATTGAACCGGTGCCTAGAGAAGGTGGCGCGGGGTAAACTGGG | |
| | AAAGTGATGTCGTGTACTGGCTCCGCCTTTTTCCCGAGGGTGGGGGAGAACCGT | |
| | ATATAAGTGCAGTAGTCGCCGTGAACGTTCTTTTTCGCAACGGGTTTGCCGCCA | |
| | GAACACGCGTAAG | |
| Promoter | GCTCCGGTGCCCGTCAGTGGGCAGAGCGCACATCGCCCACAGTCCCCGAGAAGT | 9012 |
| Variant 9 | TGGGGGGAGGGGTCGGCAATTGAACCGGTGCCTAGAGAAGGTGGCGCGGGGTAA | |
| | ACTGGGAAAGTGATGTCGTGTACTGGCTCCGCCTTTTTCCCGAGGGGGGGGAG | |
| | AACCGTATATAAGTGCAGTAGTCGCCGTGAACGTTCTTTTTCGCAACGGGTTTG | |
| | CCGCCAGAACACGCGTAAG | |
| Promoter | CGTGAGGCTCCGGTGCCCGTCAGTGGGCAGAGCGCACATCGCCCACAGTCCCCG | 9013 |
| Variant 10 | AGAAGTTGGGGGGAGGGGTCGGCAATTGAACCGGTGCCTAGAGAAGGTGGCGCG | |
| | GGGTAAACTGGGAAAGTGATGTCGTGTACTGGCTCCGCCTTTTTCCCGAGGGTG | |
| | GGGGAGAACCGTATATAAGTGCAGTAGTCGCCGTGAACGTTCTTTTTCGCAACG | |
| | GGTTTGCCGCCAGAACACGCGTAAG | |
| Promoter | CGTGAGGCTCCGGTGCCCGTCAGTGGGCAGAGCGCACATCGCCCACAGTCCCCG | 9014 |
| Variant 11 | AGAAGTTGGGGGGAGGGGTCGGCAATTGAACCGGTGCCTAGAGAAGGTGGCGCG | |
| | GGGTAAACTGGGAAAGTGATGTCGTGTACTGGCTCCGCCTTTTTCCCGAGGGTG | |
| | GGGGAGAACCGTATATAAGTGCAGTAGTCGCCGTGAACGTTCTTTTTCGCAACG | |
| | GGTTTGCCGCCAGAACACAG | |
| Promoter | GCATGCGTGAGGCTCCGGTGCCCGTCAGTGGGCAGAGCGCACATCGCCCACAGT | 9015 |
| Variant 12 | CCCCGAGAAGTTGGGGGGAGGGGTCGGCAATTGAACCGGTGCCTAGAGAAGGTG | |
| | GCGCGGGGTAAACTGGGAAAGTGATGTCGTGTACTGGCTCCGCCTTTTTCCCGA | |
| | GGGTGGGGGAGAACCGTATATAAGTGCAGTAGTCGCCGTGAACGTTCTTTTTCG | |
| | CAACGGGTTTGCCGCCAGAACACGCGTAAG | |
| Promoter | GCATGCGTGAGGCTCCGGTGCCCGTCAGTGGGCAGAGCGCACATCGCCCACAGT | 9016 |
| Variant 13 | CCCCGAGAAGTTGGGGGGAGGGGTCGGCAATTGAACCGGTGCCTAGAGAAGGTG | |
| | GCGCGGGGTAAACTGGGAAAGTGATGTCGTGTACTGGCTCCGCCTTTTTCCCGA | |
| | GGGTGGGGGAGAACCGTATATAAGTGCAGTAGTCGCCGTGAACGTTCTTTTTCG | |
| | CAACGGGTTTGCCGCCAGAACACAG | |
| Promoter | GGTGGAGAAGAGCATGCGTGAGGCTCCGGTGCCCGTCAGTGGGCAGAGCGCACA | 9017 |
| Variant 14 | TCGCCCACAGTCCCCGAGAAGITGGGGGGAGGGGTCGGCAATTGAACCGGTGCC | |
| | TAGAGAAGGTGGCGCGGGGTAAACTGGGAAAGTGATGTCGTGTACTGGCTCCGC | |
| | CTTTTTCCCGAGGGGGGGGAGAACCGTATATAAGTGCAGTAGTCGCCGTGAAC | |
| | GTTCTTTTTCGCAACGGGTTTGCCGCCAGAACACGCGTAAG | |
| Promoter | GGTGGAGAAGAGCATGCGTGAGGCTCCGGTGCCCGTCAGTGGGCAGAGCGCACA | 9018 |
| Variant 15 | TCGCCCACAGTCCCCGAGAAGITGGGGGGAGGGGTCGGCAATTGAACCGGTGCC | |
| | TAGAGAAGGTGGCGCGGGGTAAACTGGGAAAGTGATGTCGTGTACTGGCTCCGC | |
| | CTTTTTCCCGAGGGTGGGGGAGAACCGTATATAAGTGCAGTAGTCGCCGTGAAC | |
| | GTTCTTTTTCGCAACGGGTTTGCCGCCAGAACACAG | |
| Promoter | GTCATCACTGAGGIGGAGAAGAGCATGCGTGAGGCTCCGGTGCCCGTCAGTGGG | 9019 |
| Variant 16 | CAGAGCGCACATCGCCCACAGTCCCCGAGAAGTTGGGGGGAGGGGTCGGCAATT | |
| | GAACCGGTGCCTAGAGAAGGTGGCGCGGGGTAAACTGGGAAAGTGATGTCGTGT | |
| | ACTGGCTCCGCCTTTTTCCCGAGGGTGGGGGAGAACCGTATATAAGTGCAGTAG | |
| | TCGCCGTGAACGTTCTTTTTCGCAACGGGTTTGCCGCCAGAACACGCGTAAG | |
| Promoter | GTCATCACTGAGGTGGAGAAGAGCATGCGTGAGGCTCCGGTGCCCGTCAGTGGG | 9020 |
| Variant 18 | CAGAGCGCACATCGCCCACAGTCCCCGAGAAGTTGGGGGGAGGGGTCGGCAATT | |
| | GAACCGGTGCCTAGAGAAGGTGGCGCGGGGTAAACTGGGAAAGTGATGTCGTGT | |
| | ACTGGCTCCGCCTTTTTCCCGAGGGGGGGGAGAACCGTATATAAGTGCAGTAG | |
| | TCGCCGTGAACGTTCTTTTTCGCAACGGGTTTGCCGCCAGAACACAG | |

### Viral Genome Component: Untranslated Regions (UTRs)

[1340] In some embodiments, wild type untranslated regions (UTRs) of a gene are transcribed but not translated. Generally, the 5′ UTR starts at the transcription start site and ends at the start codon and the 3′ UTR starts immediately following the stop codon and continues until the termination signal for transcription.

[1341] Features typically found in abundantly expressed genes of specific target organs (e.g., CNS tissue, muscle, or DRG) may be engineered into UTRs to enhance stability and protein production. As a non-limiting example, a 5′ UTR from mRNA normally expressed in the brain (e.g., huntingtin) may be used in the viral genomes of the AAV particles described herein to enhance expression in neuronal cells or other cells of the central nervous system.

[1342] While not wishing to be bound by theory, wild-type 5′ untranslated regions (UTRs) include features which play roles in translation initiation. Kozak sequences, which are commonly known to be involved in the process by which the ribosome initiates translation of many genes, are usually included in 5′ UTRs. Kozak sequences have the consensus CCR(A/G)CCAUGG, where R is a purine (adenine or guanine) three bases upstream of the start codon (ATG), which is followed by another ‘G’.

[1343] In one embodiment, the 5′UTR in the viral genome includes a Kozak sequence.

[1344] In one embodiment, the 5′UTR in the viral genome does not include a Kozak sequence.

[1345] While not wishing to be bound by theory, wild-type 3′ UTRs are known to have stretches of Adenosines and Uridines embedded therein. These AU rich signatures are particularly prevalent in genes with high rates of turnover. Based on their sequence features and functional properties, the AU rich elements (AREs) can be separated into three classes (Chen et al, 1995, the contents of which are herein incorporated by reference in its entirety): Class I AREs, such as, but not limited to, c-Myc and MyoD, contain several dispersed copies of an AUUUA motif within U-rich regions. Class II AREs, such as, but not limited to, GM-CSF and TNF-a, possess two or more overlapping UUAUUUA(U/A)(U/A) nonamers. Class III ARES, such as, but not limited to, c-Jun and Myogenin, are less well defined. These U rich regions do not contain an AUUUA motif. Most proteins binding to the AREs are known to destabilize the messenger, whereas members of the ELAV family, most notably HuR, have been documented to increase the stability of mRNA. HuR binds to AREs of all the three classes. Engineering the HuR specific binding sites into the 3′ UTR of nucleic acid molecules will lead to HuR binding and thus, stabilization of the message in vivo.

[1346] Introduction, removal or modification of 3′ UTR AU rich elements (AREs) can be used to modulate the stability of a polynucleotide. When engineering specific polynucleotides, e.g., payload regions of viral genomes, one or more copies of an ARE can be introduced to make polynucleotides less stable and thereby curtail translation and decrease production of the resultant protein. Likewise, AREs can be identified and removed or mutated to increase the intracellular stability and thus increase translation and production of the resultant protein.

[1347] In one embodiment, the 3′ UTR of the viral genome may include an oligo(dT) sequence for templated addition of a poly-A tail.

[1348] In one embodiment, the viral genome may include at least one miRNA seed, binding site or full sequence. microRNAs (or miRNA or miR) are 19-25 nucleotide noncoding RNAs that bind to the sites of nucleic acid targets and down-regulate gene expression either by reducing nucleic acid molecule stability or by inhibiting translation. In some embodiments, a microRNA sequence comprises a seed region, e.g., a sequence in the region of positions 2-8 of the mature microRNA, which has Watson-Crick sequence fully or partially complementarity to the miRNA target sequence of the nucleic acid.

[1349] In one embodiment, the viral genome may be engineered to include, alter or remove at least one miRNA binding site, full sequence or seed region.

[1350] Any UTR from any gene known in the art may be incorporated into the viral genome of the AAV particle. These UTRs, or portions thereof, may be placed in the same orientation as in the gene from which they were selected, or they may be altered in orientation or location. In one embodiment, the UTR used in the viral genome of the AAV particle may be inverted, shortened, lengthened, made with one or more other 5′ UTRs or 3′ UTRs known in the art. As used herein, the term “altered” as it relates to a UTR, means that the UTR has been changed in some way in relation to a reference sequence. For example, a 3′ or 5′ UTR may be altered relative to a wild type or native UTR by the change in orientation or location as taught above or may be altered by the inclusion of additional nucleotides, deletion of nucleotides, swapping or transposition of nucleotides.

[1351] In one embodiment, the viral genome of the AAV particle comprises at least one artificial UTR which is not a variant of a wild type UTR.

[1352] In one embodiment, the viral genome of the AAV particle comprises UTRs which have been selected from a family of transcripts whose proteins share a common function, structure, feature or property.

### Viral Genome Component: Polyadenylation Sequence

[1353] The viral genome of the AAV particle described herein (e.g., an AAV particle comprising an AAV capsid polypeptide, e.g., an AAV capsid variant, described herein) may comprise a polyadenylation sequence. In some embodiments, the viral genome of the AAV particle (e.g., an AAV particle comprising an AAV capsid polypeptide, e.g., an AAV capsid variant, described herein) comprises a polyadenylation sequence between the 3′ end of the nucleotide sequence encoding the payload and the 5′ end of the 3′ITR.

### Viral Genome Component: Introns

[1354] In some embodiments, the viral genome of the AAV particle as described herein (e.g., an AAV particle comprising an AAV capsid polypeptide, e.g., an AAV capsid variant), comprises an element to enhance the payload target specificity and expression (See e.g., Powell et al. Viral Expression Cassette Elements to Enhance Transgene Target Specificity and Expression in Gene Therapy, Discov. Med, 2015, 19(102): 49-57; the contents of which are herein incorporated by reference in their entirety) such as an intron. Non-limiting examples of introns include, MVM (67-97 bps), F.IX truncated intron 1 (300 bps), β-globin SD/immunoglobulin heavy chain splice acceptor (250 bps), adenovirus splice donor/immunoglobin splice acceptor (500 bps), SV40 late splice donor/splice acceptor (19S/16S) (180 bps) and hybrid adenovirus splice donor/IgG splice acceptor (230 bps).

### Viral Genome Component: Stuffer Sequences

[1355] In some embodiments, the viral genome of an AAV particle described herein (e.g., an AAV particle comprising an AAV capsid polypeptide, e.g., an AAV capsid variant), comprises an element to improve packaging efficiency and expression, such as a stuffer or filler sequence. Non-limiting examples of stuffer sequences include albumin and/or alpha-1 antitrypsin. Any known viral, mammalian, or plant sequence may be manipulated for use as a stuffer sequence.

[1356] In one embodiment, the stuffer or filler sequence may be from about 100-3500 nucleotides in length. The stuffer sequence may have a length of about 100, 200, 300, 400, 500, 600, 700, 800, 900, 1000, 1100, 1200, 1300, 1400, 1500, 1600, 1700, 1800, 1900, 2000, 2100, 2200, 2300, 2400, 2500, 2600, 2700, 2800, 2900 or 3000 nucleotides.

Viral Genome Component: miRNA

[1357] In some embodiments, the viral genome comprises a sequence encoding a miRNA to reduce the expression of the payload in a tissue or cell, e.g., the DRG (dorsal root ganglion), or neurons of other ganglia, such as those of the sympathetic or parasympathetic nervous system. In some embodiments, a miRNA, e.g., a miR183, a miR182, and/or miR96, may be encoded in the viral genome to modulate, e.g., reduce the expression, of the viral genome in a DRG neuron. As another non-limiting example, a miR-122 miRNA may be encoded in the viral genome to modulate, e.g., reduce, the expression of the viral genome in the liver. In some embodiments, a miRNA, e.g., a miR-142-3p, may be encoded in the viral genome to modulate, e.g., reduce, the expression, of the viral genome in a cell or tissue of the hematopoietic lineage, including for example immune cells (e.g., antigen presenting cells or APC, including dendritic cells (DCs), macrophages, and B-lymphocytes). In some embodiments, a miRNA, e.g., a miR-1, may be encoded in the viral genome to modulate, e.g., reduce, the expression, of the viral genome in a cell or tissue of the heart.

### Viral Genome Component: miR Binding Site

[1358] Tissue- or cell-specific expression of the AAV viral particles disclosed herein can be enhanced by introducing tissue- or cell-specific regulatory sequences, e.g., promoters, enhancers, microRNA binding sites, e.g., a detargeting site. Without wishing to be bound by theory, it is believed that an encoded miR binding site can modulate, e.g., prevent, suppress, or otherwise inhibit, the expression of a gene of interest on the viral genome disclosed herein, based on the expression of the corresponding endogenous microRNA (miRNA) or a corresponding controlled exogenous miRNA in a tissue or cell, e.g., a non-targeting cell or tissue. In some embodiments, a miR binding site modulates, e.g., reduces, expression of the payload encoded by a viral genome of an AAV particle described herein in a cell or tissue where the corresponding mRNA is expressed.

[1359] In some embodiments, the viral genome of an AAV particle described herein comprises a nucleotide sequence encoding a microRNA binding site, e.g., a detargeting site. In some embodiments, the viral genome of an AAV particle described herein comprises a nucleotide sequence encoding a miR binding site, a microRNA binding site series (miR BSs), or a reverse complement thereof.

[1360] In some embodiments, the nucleotide sequence encoding the miR binding site series or the miR binding site is located in the 3′-UTR region of the viral genome (e.g., 3′ relative to the nucleotide sequence encoding a payload), e.g., before the polyA sequence, 5′-UTR region of the viral genome (e.g., 5′ relative to the nucleotide sequence encoding a payload), or both.

[1361] In some embodiments, the encoded miR binding site series comprise at least 1-5 copies, e.g., at least 1-3, 2-4, 3-5, 1, 2, 3, 4, 5 or more copies of a miR binding site (miR BS). In some embodiments, all copies are identical, e.g., comprise the same miR binding site. In some embodiments, the miR binding sites within the encoded miR binding site series are continuous and not separated by a spacer. In some embodiments, the miR binding sites within an encoded miR binding site series are separated by a spacer, e.g., a non-coding sequence. In some embodiments, the spacer is about 1 to 6 nucleotides or about 5 to 10 nucleotides, e.g., about 7-8 nucleotides, nucleotides in length. In some embodiments, the spacer coding sequence or reverse complement thereof comprises one or more of (i) GGAT; (ii) CACGTG; (iii) GCATGC, or a repeat of one or more of (i)-(iii). In some embodiments, the spacer comprises the nucleotide sequence of GATAGTTA, or a nucleotide sequence having at least one, two, or three modifications, e.g., substitutions (e.g., conservative substitutions), insertions, or deletions, but no more than four modifications, e.g., substitutions (e.g., conservative substitutions), insertions, or deletions, of GATAGTTA.

[1362] In some embodiments, the encoded miR binding site series comprise at least 1-5 copies, e.g., at least 1-3, 2-4, 3-5, 1, 2, 3, 4, 5 or more copies of a miR binding site (miR BS). In some embodiments, at least 1, 2, 3, 4, 5, or all of the copies are different, e.g., comprise a different miR binding site. In some embodiments, the miR binding sites within the encoded miR binding site series are continuous and not separated by a spacer. In some embodiments, the miR binding sites within an encoded miR binding site series are separated by a spacer, e.g., a non-coding sequence. In some embodiments, the spacer is about 1 to 6 nucleotides or about 5 to 10 nucleotides, e.g., about 7-8 nucleotides, in length. In some embodiments, the spacer comprises one or more of (i) GGAT; (ii) CACGTG; (iii) GCATGC, or a repeat of one or more of (i)-(iii). In some embodiments, the spacer comprises the nucleotide sequence of GATAGTTA, or a nucleotide sequence having at least one, two, or three modifications, e.g., substitutions (e.g., conservative substitutions), insertions, or deletions, but no more than four modifications, e.g., substitutions (e.g., conservative substitutions), insertions, or deletions, of GATAGTTA.

[1363] In some embodiments, the encoded miR binding site is substantially identical (e.g., at least 70%, 75%, 80%, 85%, 90%, 95%, 99% or 100% identical), to the miR in the host cell. In some embodiments, the encoded miR binding site comprises at least 1, 2, 3, 4, or 5 mismatches or no more than 6, 7, 8, 9, or 10 mismatches to a miR in the host cell. In some embodiments, the mismatched nucleotides are contiguous. In some embodiments, the mismatched nucleotides are non-contiguous. In some embodiments, the mismatched nucleotides occur outside the seed region-binding sequence of the miR binding site, such as at one or both ends of the miR binding site. In some embodiments, the miR binding site is 100% identical to the miR in the host cell.

[1364] In some embodiments, the nucleotide sequence encoding the miR binding site is substantially complimentary (e.g., at least 70%, 75%, 80%, 85%, 90%, 95%, 99% or 100% complimentary), to the miR in the host cell. In some embodiments, to complementary sequence of the nucleotide sequence encoding the miR binding site comprises at least 1, 2, 3, 4, or 5 mismatches or no more than 6, 7, 8, 9, or 10 mismatches to a miR in the host cell. In some embodiments, the mismatched nucleotides are contiguous. In some embodiments, the mismatched nucleotides are non-contiguous. In some embodiments, the mismatched nucleotides occur outside the seed region-binding sequence of the miR binding site, such as at one or both ends of the miR binding site. In some embodiments, the encoded miR binding site is 100% complimentary to the miR in the host cell.

[1365] In some embodiments, an encoded miR binding site or sequence region is at least about 10 to about 125 nucleotides in length, e.g., at least about 10 to 50 nucleotides, 10 to 100 nucleotides, 50 to 100 nucleotides, 50 to 125 nucleotides, or 100 to 125 nucleotides in length. In some embodiments, an encoded miR binding site or sequence region is at least about 7 to about 28 nucleotides in length, e.g., at least about 8-28 nucleotides, 7-28 nucleotides, 8-18 nucleotides, 12-28 nucleotides, 20-26 nucleotides, 22 nucleotides, 24 nucleotides, or 26 nucleotides in length, and optionally comprises at least one consecutive region (e.g., 7 or 8 nucleotides) complementary (e.g., fully or partially complementary) to the seed sequence of a miRNA (e.g., a miR122, a miR142, a miR183, or a miR1).

[1366] In some embodiments, the encoded miR binding site is complementary (e.g., fully or partially complementary) to a miR expressed in liver or hepatocytes, such as miR122. In some embodiments, the encoded miR binding site or encoded miR binding site series comprises a miR122 binding site sequence. In some embodiments, the encoded miR122 binding site comprises the nucleotide sequence of ACAAACACCATTGTCACACTCCA (SEQ ID NO: 3672), or a nucleotide sequence having at least 50%, 55%, 60%, 65%, 70%, 75%, 80%, 85%, 90%, at least 95%, at least 99%, or 100% sequence identity, or having at least one, two, three, four, five, six, or seven modifications, e.g., substitutions (e.g., conservative substitutions), insertions, or deletions, but no more than ten modifications, e.g., substitutions (e.g., conservative substitutions), insertions, or deletions, to SEQ ID NO: 3672, e.g., wherein the modification can result in a mismatch between the encoded miR binding site and the corresponding miRNA. In some embodiments, the viral genome comprises at least 2, 3, 4, or 5 copies of the encoded miR122 binding site, e.g., an encoded miR122 binding site series, optionally wherein the encoded miR122 binding site series comprises the nucleotide sequence of: ACAAACACCATTGTCACACTCCACACAAACACCATTGTCACACTCCACACAAACACCATTGT CACACTCCA (SEQ ID NO: 3673), or a nucleotide sequence having at least 50%, 55%, 60%, 65%, 70%, 75%, 80%, 85%, 90%, at least 95%, at least 99%, or 100% sequence identity, or having at least one, two, three, four, five, six, or seven modifications, e.g., substitutions (e.g., conservative substitutions), insertions, or deletions, but no more than ten modifications, e.g., substitutions (e.g., conservative substitutions), insertions, or deletions, to SEQ ID NO: 3673, e.g., wherein the modification can result in a mismatch between the encoded miR binding site and the corresponding miRNA. In some embodiments, at least two of the encoded miR122 binding sites are connected directly, e.g., without a spacer. In other embodiments, at least two of the encoded miR122 binding sites are separated by a spacer, e.g., 1, 2, 3, 4, 5, 6, 7, 8, 9, or 10 nucleotides in length, which is located between two or more consecutive encoded miR122 binding site sequences. In embodiments, the spacer is about 1 to 6 nucleotides or about 5 to 10 nucleotides, e.g., about 7-8, in length. In some embodiments, the spacer coding sequence or reverse complement thereof comprises one or more of (i) GGAT; (ii) CACGTG; (iii) GCATGC, or a repeat of one or more of (i)-(iii). In some embodiments, an encoded miR binding site series comprises at least 3-5 copies (e.g., 4 copies) of a miR122 binding site, with or without a spacer, wherein the spacer is about 1 to 6 nucleotides or about 5 to 10 nucleotides, e.g., about 7-8 nucleotides or about 8 nucleotides, in length. In some embodiments, the spacer comprises the nucleotide sequence of GATAGTTA, or a nucleotide sequence having at least one, two, or three modifications, e.g., substitutions (e.g., conservative substitutions), insertions, or deletions, but no more than four modifications, e.g., substitutions (e.g., conservative substitutions), insertions, or deletions, of GATAGTTA.

[1367] In some embodiments, the encoded miR binding site is complementary (e.g., fully or partially complementary) to a miR expressed in the heart. In embodiments, the encoded miR binding site or encoded miR binding site series comprises a miR-1 binding site. In some embodiments, the encoded miR-1 binding site comprises the nucleotide sequence of ATACATACTTCTTTACATTCCA (SEQ ID NO: 4679), a nucleotide sequence having at least 50%, 55%, 60%, 65%, 70%, 75%, 80%, 85%, 90%, at least 95%, at least 99%, or 100% sequence identity, or having at least one, two, three, four, five, six, or seven modifications e.g., substitutions (e.g., conservative substitutions), insertions, or deletions, but no more than ten modifications, e.g., substitutions (e.g., conservative substitutions), insertions, or deletions, to SEQ ID NO: 4679, e.g., wherein the modification can result in a mismatch between the encoded miR binding site and the corresponding miRNA. In some embodiments, the viral genome comprises at least 2, 3, 4, or 5 copies of the encoded miR-1 binding site, e.g., an encoded miR-1 binding site series. In some embodiments, the at least 2, 3, 4, or 5 copies (e.g., 2 or 3 copies) of the encoded miR-1 binding site are continuous (e.g., not separated by a spacer) or separated by a spacer. In some embodiments, the spacer is about 1 to 6 nucleotides or about 5 to 10 nucleotides, e.g., about 7-8 nucleotides or about 8 nucleotides, in length. In some embodiments, the spacer sequence comprises one or more of (i) GGAT; (ii) CACGTG; (iii) GCATGC, or a repeat of one or more of (i)-(iii). In some embodiments, the spacer comprises the nucleotide sequence of GATAGTTA, or a nucleotide sequence having at least one, two, or three modifications, e.g., substitutions (e.g., conservative substitutions), insertions, or deletions, but no more than four modifications, e.g., substitutions (e.g., conservative substitutions), insertions, or deletions, of GATAGTTA.

[1368] In some embodiments, the encoded miR binding site is complementary (e.g., fully or partially complementary) to a miR expressed in hematopoietic lineage, including immune cells (e.g., antigen presenting cells or APC, including dendritic cells (DCs), macrophages, and B-lymphocytes). In some embodiments, the encoded miR binding site complementary to a miR expressed in hematopoietic lineage comprises a nucleotide sequence disclosed, e.g., in US 2018/0066279, the contents of which are incorporated by reference herein in its entirety.

[1369] In embodiments, the encoded miR binding site or encoded miR binding site series comprises a miR-142-3p binding site sequence. In some embodiments, the encoded miR-142-3p binding site comprises the nucleotide sequence of TCCATAAAGTAGGAAACACTACA (SEQ ID NO: 3674), a nucleotide sequence having at least 50%, 55%, 60%, 65%, 70%, 75%, 80%, 85%, 90%, at least 95%, at least 99%, or 100% sequence identity, or having at least one, two, three, four, five, six, or seven modifications e.g., substitutions (e.g., conservative substitutions), insertions, or deletions, but no more than ten modifications, e.g., substitutions (e.g., conservative substitutions), insertions, or deletions, to SEQ ID NO: 3674, e.g., wherein the modification can result in a mismatch between the encoded miR binding site and the corresponding miRNA. In some embodiments, the viral genome comprises at least 2, 3, 4, or 5 copies of the encoded miR-142-3p binding site, e.g., an encoded miR-142-3p binding site series. In some embodiments, the at least 2, 3, 4, or 5 copies (e.g., 2 or 3 copies) of the encoded miR-142-3p binding site are continuous (e.g., not separated by a spacer) or separated by a spacer. In some embodiments, the spacer is about 1 to 6 nucleotides or about 5 to 10 nucleotides, e.g., about 7-8 nucleotides or about 8 nucleotides, in length. In some embodiments, the spacer sequence comprises one or more of (i) GGAT; (ii) CACGTG; (iii) GCATGC, or a repeat of one or more of (i)-(iii). In some embodiments, the spacer comprises the nucleotide sequence of, or a nucleotide sequence having at least one, two, or three modifications, e.g., substitutions (e.g., conservative substitutions), insertions, or deletions, but no more than four modifications, e.g., substitutions (e.g., conservative substitutions), insertions, or deletions, of GATAGTTA.

[1370] In some embodiments, the encoded miR binding site is complementary (e.g., fully complementary or partially complementary) to a miR expressed in a DRG (dorsal root ganglion) neuron, e.g., a miR183, a miR182, and/or miR96 binding site. In some embodiments, the encoded miR binding site is complementary to a miR expressed in expressed in a DRG neuron comprises a nucleotide sequence disclosed, e.g., in WO2020/132455, the contents of which are incorporated by reference herein in its entirety.

[1371] In some embodiments, the encoded miR binding site or encoded miR binding site series comprises a miR183 binding site sequence. In some embodiments, the encoded miR183 binding site comprises the nucleotide sequence of AGTGAATTCTACCAGTGCCATA (SEQ ID NO: 3675), or a nucleotide sequence having at least 50%, 55%, 60%, 65%, 70%, 75%, 80%, 85%, 90%, at least 95%, at least 99%, or 100% sequence identity, or having at least one, two, three, four, five, six, or seven modifications, e.g., substitutions (e.g., conservative substitutions), insertions, or deletions, but no more than ten modifications, e.g., substitutions (e.g., conservative substitutions), insertions, or deletions, to SEQ ID NO: 3675, e.g., wherein the modification can result in a mismatch between the encoded miR binding site and the corresponding miRNA. In some embodiments, the sequence complementary to the seed sequence corresponds to the double underlined of the encoded miR-183 binding site sequence. In some embodiments, the viral genome comprises at least comprises at least 2, 3, 4, or 5 copies (e.g., at least 2 or 3 copies) of the encoded miR183 binding site, e.g., an encoded miR183 binding site. In some embodiments, the at least 2, 3, 4, or 5 copies (e.g., 2 or 3 copies) of the encoded miR183 binding site are continuous (e.g., not separated by a spacer) or separated by a spacer. In some embodiments, the spacer is about 1 to 6 nucleotides or about 5 to 10 nucleotides, e.g., about 7-8 nucleotides or about 8 nucleotides, in length. In some embodiments, the spacer comprises the nucleotide sequence of GATAGTTA, or a nucleotide sequence having at least one, two, or three modifications, e.g., substitutions (e.g., conservative substitutions), insertions, or deletions, but no more than four modifications, e.g., substitutions (e.g., conservative substitutions), insertions, or deletions, of GATAGTTA. In some embodiments, the spacer sequence comprises one or more of (i) GGAT; (ii) CACGTG; (iii) GCATGC, or a repeat of one or more of (i)-(iii).

[1372] In some embodiments, the encoded miR binding site or the encoded miR binding site series comprises a miR182 binding site sequence. In some embodiments, the encoded miR182 binding site comprises, the nucleotide sequence of AGTGTGAGTTCTACCATTGCCAAA (SEQ ID NO: 3676), a sequence having at least 50%, 55%, 60%, 65%, 70%, 75%, 80%, 85%, 90%, at least 95%, at least 99%, or 100% sequence identity, or having at least one, two, three, four, five, six, or seven modifications, e.g., substitutions (e.g., conservative substitutions), insertions, or deletions, but no more than ten modifications, e.g., substitutions (e.g., conservative substitutions), insertions, or deletions, to SEQ ID NO: 3676, e.g., wherein the modification can result in a mismatch between the encoded miR binding site and the corresponding miRNA. In some embodiments, the viral genome comprises at least 2, 3, 4, or 5 copies of the encoded miR182 binding site, e.g., an encoded miR182 binding site series. In some embodiments, the at least 2, 3, 4, or 5 copies (e.g., 2 or 3 copies) of the encoded miR182 binding site are continuous (e.g., not separated by a spacer) or separated by a spacer. In some embodiments, the spacer is about 1 to 6 nucleotides or about 5 to 10 nucleotides, e.g., about 7-8 nucleotides or about 8 nucleotides, in length. In some embodiments, the spacer comprises the nucleotide sequence of GATAGTTA, or a nucleotide sequence having at least one, two, or three modifications, e.g., substitutions (e.g., conservative substitutions), insertions, or deletions, but no more than four modifications, e.g., substitutions (e.g., conservative substitutions), insertions, or deletions, of GATAGTTA. In some embodiments, the spacer sequence comprises one or more of (i) GGAT; (ii) CACGTG; (iii) GCATGC, or a repeat of one or more of (i)-(iii).

[1373] In certain embodiments, the encoded miR binding site or the encoded miR binding site series comprises a miR96 binding site sequence. In some embodiments, the encoded miR96 binding site comprises the nucleotide sequence of AGCAAAAATGTGCTAGTGCCAAA (SEQ ID NO: 3677), a sequence having at least 50%, 55%, 60%, 65%, 70%, 75%, 80%, 85%, 90%, at least 95%, at least 99%, or 100% sequence identity, or having at least one, two, three, four, five, six, or seven modifications, e.g., substitutions (e.g., conservative substitutions), insertions, or deletions, but no more than ten modifications, e.g., substitutions (e.g., conservative substitutions), insertions, or deletions, to SEQ ID NO: 3677, e.g., wherein the modification can result in a mismatch between the encoded miR binding site and the corresponding miRNA. In some embodiments, the viral genome comprises at least 2, 3, 4, or 5 copies of the encoded miR96 binding site, e.g., an encoded miR96 binding site series. In some embodiments, the at least 2, 3, 4, or 5 copies (e.g., 2 or 3 copies) of the encoded miR96 binding site are continuous (e.g., not separated by a spacer) or separated by a spacer. In some embodiments, the spacer is about 1 to 6 nucleotides or about 5 to 10 nucleotides, e.g., about 7-8 nucleotides or about 8 nucleotides, in length. In some embodiments, the spacer comprises the nucleotide sequence of GATAGTTA, or a nucleotide sequence having at least one, two, or three modifications, e.g., substitutions (e.g., conservative substitutions), insertions, or deletions, but no more than four modifications, e.g., substitutions (e.g., conservative substitutions), insertions, or deletions, of GATAGTTA. In some embodiments, the spacer sequence comprises one or more of (i) GGAT; (ii) CACGTG; (iii) GCATGC, or a repeat of one or more of (i)-(iii).

[1374] In some embodiments, the encoded miR binding site series comprises a miR122 binding site, a miR-1, a miR142 binding site, a miR183 binding site, a miR182 binding site, a miR 96 binding site, or a combination thereof. In some embodiments, the encoded miR binding site series comprises at least 2, 3, 4, or 5 copies of a miR122 binding site, a miR142 binding site, a miR183 binding site, a miR182 binding site, a miR 96 binding site, or a combination thereof. In some embodiments, at least two of the encoded miR binding sites are connected directly, e.g., without a spacer. In other embodiments, at least two of the encoded miR binding sites are separated by a spacer, e.g., 1, 2, 3, 4, 5, 6, 7, 8, 9, or 10 nucleotides in length, which is located between two or more consecutive encoded miR binding site sequences. In embodiments, the spacer is at least about 5 to 10 nucleotides, e.g., about 7-8 nucleotides or about 8 nucleotides, in length. In some embodiments, the spacer coding sequence or reverse complement thereof comprises one or more of (i) GGAT; (ii) CACGTG; (iii) GCATGC, or a repeat of one or more of (i)-(iii). In some embodiments, the spacer comprises the nucleotide sequence of GATAGTTA, or a nucleotide sequence having at least one, two, or three modifications, e.g., substitutions (e.g., conservative substitutions), insertions, or deletions, but no more than four modifications, e.g., substitutions (e.g., conservative substitutions), insertions, or deletions, of GATAGTTA.

[1375] In some embodiments, an encoded miR binding site series comprises at least 2-5 copies (e.g., 2 or 3 copies) of a combination of at least two, three, four, five, or all of a miR-1, miR122 binding site, a miR142 binding site, a miR183 binding site, a miR182 binding site, a miR96 binding site, wherein each of the miR binding sites within the series are continuous (e.g., not separated by a spacer) or are separated by a spacer. In some embodiments, the spacer is about 1 to 6 nucleotides or about 5 to 10 nucleotides, e.g., about 7-8 nucleotides or about 8 nucleotides, in length. In some embodiments, the spacer sequence comprises one or more of (i) GGAT; (ii) CACGTG; (iii) GCATGC, or a repeat of one or more of (i)-(iii). In some embodiments, the spacer comprises the nucleotide sequence of GATAGTTA, or a nucleotide sequence having at least one, two, or three modifications, e.g., substitutions (e.g., conservative substitutions), insertions, or deletions, but no more than four modifications, e.g., substitutions (e.g., conservative substitutions), insertions, or deletions, of GATAGTTA.

[1376] In some embodiments, an encoded miR binding site series comprises at least 2-5 copies (e.g., 2 or 3 copies) of a combination of a miR-122 binding site and a miR-1 binding site, wherein each of the miR binding sites within the series are continuous (e.g., not separated by a spacer) or are separated by a spacer. In some embodiments, the spacer is about 1 to 6 nucleotides or about 5 to 10 nucleotides, e.g., about 7-8 nucleotides or about 8 nucleotides, in length. In some embodiments, the spacer sequence comprises one or more of (i) GGAT; (ii) CACGTG; (iii) GCATGC, or a repeat of one or more of (i)-(iii). In some embodiments, the spacer comprises the nucleotide sequence of GATAGTTA, or a nucleotide sequence having at least one, two, or three modifications, e.g., substitutions (e.g., conservative substitutions), insertions, or deletions, but no more than four modifications, e.g., substitutions (e.g., conservative substitutions), insertions, or deletions, of GATAGTTA.

### Viral Genome Component: Payloads

[1377] In some embodiments, an AAV particle, e.g., an AAV particle for the vectorized delivery of a payload comprises a nucleic acid encoding an anti-tau antibody molecule described herein. In some embodiments, an AAV particle described herein comprises at least two, at least three, or at least 4 payloads. In some embodiments, an AAV particle, e.g., an AAV particle for the vectorized delivery of an antibody molecule described herein (e.g., an anti-tau antibody molecule), comprises a nucleic acid comprising a transgene encoding a payload. In some embodiments, the payload comprises an antibody molecule, e.g., an anti-tau antibody molecule. In some embodiments, the payload comprises a secreted protein, an intracellular protein, an extracellular protein, a membrane protein, a structural protein, a functional protein, or a protein, e.g., a mammalian protein, involved in immune system regulation. In some embodiments, a nucleic acid comprises a transgene encoding an antibody molecule that binds to tau.

[1378] In some embodiments, the nucleic acid molecule comprising the transgene encoding a payload further comprises a nucleotide sequence encoding a linker (e.g., a linker connecting a heavy chain variable region (VH) and a light chain variable region (VL) of an antibody molecule) and/or a cleavage site. In some embodiments, the nucleic acid molecule comprising the transgene encoding a payload further comprises a nucleotide sequence encoding a signal sequence.

[1379] In some embodiments, the nucleic acid encoding the payload may be constructed, e.g., organized, similar to, e.g., mirroring, the natural organization of an mRNA. In some embodiments, the nucleic acid encoding the payload may comprise coding and/or non-coding nucleotide sequences. In some embodiments, the nucleic acid encoding the payload may encode a coding and/or a non-coding RNA.

[1380] In such an embodiment, the nucleic acid comprising a transgene encoding a payload (e.g., an antibody molecule) is replicated and packaged into an AAV particle. In some embodiments, following transduction of a cell with an AAV particle comprising a payload (e.g., an antibody molecule), the cell expresses the payload. In some embodiments, the payload, e.g., antibody molecule, produced by a cell transduced by an AAV particle comprising the payload, is secreted from the cell.

[1381] In some embodiments, the payload region may comprise at least one inverted terminal repeat (ITR), a promoter region, an intron region, and a coding region. In some embodiments, the coding region comprises a heavy chain region and/or a light chain region of an antibody molecule, and any two components may be separated by a linker region.

[1382] In some embodiments, the coding region may comprise a payload region with a heavy chain and light chain sequence separated by a linker and/or a cleavage site. In some embodiments, the heavy and light chain sequence is separated by an IRES sequence. In some embodiments, the heavy and light chain sequence is separated by a foot and mouth virus sequence. In some embodiments, the heavy and light chain sequence is separated by a foot and mouth virus sequence and a furin cleavage site. In some embodiments, the heavy and light chain sequence is separated by a porcine teschovirus-1 virus sequence. In some embodiments, the heavy and light chain sequence is separated by a porcine teschovirus-1 virus and a furin cleavage site. In some embodiments, the heavy and light chain sequence is separated by a 5xG4S sequence (“5xG4S” disclosed as SEQ ID NO: 5140).

### Antibody Molecules

[1383] In some embodiments, the nucleic acid comprises a transgene encoding an antibody molecule. In some embodiments, the encoded antibody molecule binds to tau. For example, the encoded antibody molecule binds to an epitope, e.g. a linear or conformational epitope on tau.

[1384] In some embodiments, the encoded antibody molecule comprises at least one immunoglobulin variable domain sequence. An antibody molecule may include, for example, full-length, mature antibodies and antigen-binding fragments of an antibody. For example, an antibody molecule can include a heavy (H) chain variable domain sequence (abbreviated herein as VH), and a light (L) chain variable domain sequence (abbreviated herein as VL). In another example, an antibody molecule includes two heavy (H) chain variable domain sequences and two light (L) chain variable domain sequence, thereby forming two antigen binding sites, such as Fab, Fab′, F(ab′)2, Fc, Fd, Fd′, Fv, single chain antibodies (scFv for example), single variable domain antibodies, diabodies (Dab) (bivalent and bispecific), and chimeric (e.g., humanized) antibodies, which may be produced by the modification of whole antibodies or those synthesized de novo using recombinant DNA technologies. These functional antibody fragments retain the ability to selectively bind with their respective antigen or receptor. Antibodies and antibody fragments can be from any class of antibodies including, but not limited to, IgG, IgA, IgM, IgD, and IgE, and from any subclass (e.g., IgG1, IgG2, IgG3, and IgG4) of antibodies. The encoded antibodies of the present disclosure can be monoclonal or polyclonal. The encoded antibody can also be a human, humanized, CDR-grafted, or in vitro generated antibody. The encoded antibody can have a heavy chain constant region chosen from, e.g., IgG1, IgG2, IgG3, or IgG4. The encoded antibody can also have a light chain chosen from, e.g., kappa or lambda.

[1385] Examples of antigen-binding fragments include: (i) a Fab fragment, a monovalent fragment consisting of the VL, VH, CL and CH1 domains; (ii) a F(ab′)2 fragment, a bivalent fragment comprising two Fab fragments linked by a disulfide bridge at the hinge region; (iii) a Fd fragment consisting of the VH and CH1 domains; (iv) a Fv fragment consisting of the VL and VH domains of a single arm of an antibody, (v) a diabody (dAb) fragment, which consists of a VH domain; (vi) a camelid or camelized variable domain; (vii) a single chain Fv (scFv), see e.g., Bird et al. (1988) Science 242:423-426; and Huston et al. (1988) Proc. Natl. Acad. Sci. USA 85:5879-5883); and (viii) a single domain antibody. These antibody fragments are obtained using conventional techniques known to those with skill in the art, and the fragments are screened for utility in the same manner as are intact antibodies. An antibody fragment can also be incorporated into single domain antibodies, maxibodies, minibodies, nanobodies, intrabodies, diabodies, triabodies, tetrabodies, v-NAR and bis-scFv (see, for example, Hollinger and Hudson, Nature Biotechnology 23:1126-1136, 2005).

[1386] In some embodiments, an encoded antibody molecule of the present disclosure comprises a functional fragment or variant thereof. Constant regions of the antibodies can be altered, e.g., mutated, to modify the properties of the antibody (e.g., to increase or decrease one or more of: Fc receptor binding, antibody glycosylation, the number of cysteine residues, effector cell function, or complement function).

[1387] In some embodiments, the encoded antibody molecule can be single domain antibody. Single domain antibodies can include antibodies whose complementary determining regions are part of a single domain polypeptide. Examples include, but are not limited to, heavy chain antibodies, antibodies naturally devoid of light chains, single domain antibodies derived from conventional 4-chain antibodies, engineered antibodies and single domain scaffolds other than those derived from antibodies. Single domain antibodies may be any of the art, or any future single domain antibodies. Single domain antibodies may be derived from any species including, but not limited to mouse, human, camel, llama, fish, shark, goat, rabbit, and bovine. According to another aspect of the invention, a single domain antibody is a naturally occurring single domain antibody known as heavy chain antibody devoid of light chains. Such single domain antibodies are disclosed in WO 9404678, for example. For clarity reasons, this variable domain derived from a heavy chain antibody naturally devoid of light chain is known herein as a VHH or nanobody to distinguish it from the conventional VH of four chain immunoglobulins. Such a VHH molecule can be derived from antibodies raised in Camelidae species, for example in camel, llama, dromedary, alpaca and guanaco. Other species besides Camelidae may produce heavy chain antibodies naturally devoid of light chain; such VHHs are within the scope of the invention.

[1388] In some embodiments, the VH and VL regions of the encoded antibody molecule can be subdivided into regions of hypervariability, termed complementarity determining regions (CDR), interspersed with regions that are more conserved, termed framework regions (FR or FW).

[1389] The extent of the framework region and CDRs has been precisely defined by a number of methods (see, Kabat, E. A., et al. (1991) Sequences of Proteins of Immunological Interest, Fifth Edition, U.S. Department of Health and Human Services, NIH Publication No. 91-3242; Chothia, C. et al. (1987) J. Mol. Biol. 196:901-917; and the AbM definition used by Oxford Molecular's AbM antibody modeling software. See, generally, e.g., Protein Sequence and Structure Analysis of Antibody Variable Domains. In: Antibody Engineering Lab Manual (Ed.: Duebel, S. and Kontermann, R., Springer-Verlag, Heidelberg).

[1390] Complementarity determining region, and CDR, as used herein refer to the sequences of amino acids within antibody variable regions which confer antigen specificity and binding affinity. In general, there are three CDRs in each heavy chain variable region (HCDR1, HCDR2, HCDR3) and three CDRs in each light chain variable region (LCDR1, LCDR2, LCDR3).

[1391] The precise amino acid sequence boundaries of a given CDR can be determined using any of a number of well-known schemes, including those described by Kabat et al. (1991), “Sequences of Proteins of Immunological Interest,” 5th Ed. Public Health Service, National Institutes of Health, Bethesda, MD (Kabat numbering scheme), Al-Lazikani et al., (1997) JMB 273,927-948 (Chothia numbering scheme). In some embodiments, the CDRs defined according the Chothia number scheme are also sometimes referred to as hypervariable loops.

[1392] For example, under Kabat, the CDR amino acid residues in the heavy chain variable domain (VH) are numbered 31-35 (HCDR1), 50-65 (HCDR2), and 95-102 (HCDR3); and the CDR amino acid residues in the light chain variable domain (VL) are numbered 24-34 (LCDR1), 50-56 (LCDR2), and 89-97 (LCDR3). Under Chothia the CDR amino acids in the VH are numbered 26-32 (HCDR1), 52-56 (HCDR2), and 95-102 (HCDR3); and the amino acid residues in VL are numbered 26-32 (LCDR1), 50-52 (LCDR2), and 91-96 (LCDR3). By combining the CDR definitions of both Kabat and Chothia, the CDRs consist of amino acid residues 26-35 (HCDR1), 50-65 (HCDR2), and 95-102 (HCDR3) in human VH and amino acid residues 24-34 (LCDR1), 50-56 (LCDR2), and 89-97 (LCDR3) in human VL.

[1393] In some embodiments, the antigen binding domain of the encoded antibody molecules of the present disclosure is the part of the encoded antibody molecule that comprises determinants that form an interface that binds to the tau protein or an epitope thereof. With respect to proteins (or protein mimetics), the antigen-binding site typically includes one or more loops (of at least four amino acids or amino acid mimics) that form an interface that binds to the tau protein. Typically, the antigen-binding site of an antibody molecule includes at least one or two CDRs and/or hypervariable loops, or more typically at least three, four, five or six CDRs and/or hypervariable loops.

[1394] The encoded antibody molecule can be a monoclonal antibody molecule or a polyclonal antibody molecule. In some embodiments, a monoclonal antibody or a monoclonal antibody composition refer to a preparation of antibody molecules of single molecular composition. A monoclonal antibody composition displays a single binding specificity and affinity for a particular epitope. A monoclonal antibody can be made by hybridoma technology or by methods that do not use hybridoma technology (e.g., recombinant methods).

[1395] In some embodiments, the sequences of an antibody molecule to be included in an encoded payload described herein can be generated by recombinant libraries, e.g., generated by phage display or by combinatorial methods.

[1396] Phage display and combinatorial methods for generating antibodies are known in the art (as described in, e.g., Ladner et al. U.S. Pat. No. 5,223,409; Kang et al. International Publication No. WO 92/18619; Dower et al. International Publication No. WO 91/17271; Winter et al. International Publication WO 92/20791; Markland et al. International Publication No. WO 92/15679; Breitling et al. International Publication WO 93/01288; McCafferty et al. International Publication No. WO 92/01047; Garrard et al. International Publication No. WO 92/09690; Ladner et al. International Publication No. WO 90/02809; Fuchs et al. (1991) Bio/Technology 9:1370-1372; Hay et al. (1992) Hum Antibod Hybridomas 3:81-85; Huse et al. (1989) Science 246:1275-1281; Griffths et al. (1993) EMBO J 12:725-734; Hawkins et al. (1992) J Mol Biol 226:889-896; Clackson et al. (1991) Nature 352:624-628; Gram et al. (1992) PNAS 89:3576-3580; Garrad et al. (1991) Bio/Technology 9:1373-1377; Hoogenboom et al. (1991) Nuc Acid Res 19:4133-4137; and Barbas et al. (1991) PNAS 88:7978-7982, the contents of all of which are incorporated by reference herein).

[1397] In some embodiments, the sequences of an antibody molecule to be included in an encoded payload described herein can be generated from an antibody molecule that is designed using the VERSITOPE™ Antibody Generation or BIOATLA®, e.g., in US20130303399, US20130281303, WO2012009026, WO2016033331, WO2016036916, and U.S. Pat. No. 8,859,467, the contents of which are herein incorporated by reference in their entirety. In some embodiments, the sequences of an antibody molecule to be included in an encoded payload described herein can be derived from an antibody molecule that is designed and/or produced using the methods described, e.g., in WO2017189959 and WO2020223276, the contents of which are herein incorporated by reference in their entirety.

[1398] In some embodiments, the encoded antibody comprises an amino acid sequence of a fully human antibody (e.g., an antibody made in a mouse which has been genetically engineered to produce an antibody from a human immunoglobulin sequence), or a non-human antibody, e.g., a rodent (mouse or rat), goat, primate (e.g., monkey), camel antibody. Preferably, the non-human antibody is a rodent (mouse or rat antibody). Methods of producing rodent antibodies are known in the art.

[1399] Human monoclonal antibodies can be generated using transgenic mice carrying the human immunoglobulin genes rather than the mouse system. Splenocytes from these transgenic mice immunized with the antigen of interest are used to produce hybridomas that secrete human mAbs with specific affinities for epitopes from a human protein (see, e.g., Wood et al. International Application WO 91/00906, Kucherlapati et al. PCT publication WO 91/10741; Lonberg et al. International Application WO 92/03918; Kay et al. International Application 92/03917; Lonberg, N. et al. 1994 Nature 368:856-859; Green, L. L. et al. 1994 Nature Genet. 7:13-21; Morrison, S. L. et al. 1994 Proc. Natl. Acad. Sci. USA 81:6851-6855; Bruggeman et al. 1993 Year Immunol 7:33-40; Tuaillon et al. 1993 PNAS 90:3720-3724; Bruggeman et al. 1991 Eur J Immunol 21:1323-1326).

[1400] In some embodiments, the encoded antibody comprises an amino acid sequence of an antibody in which the variable region, or a portion thereof, e.g., the CDRs, are generated in a non-human organism, e.g., a rat or mouse. Encoded antibody molecules comprising chimeric, CDR-grafted, and humanized antibodies are within the invention. Encoded antibody molecules comprising the sequences of antibodies generated in a non-human organism, e.g., a rat or mouse, and then modified, e.g., in the variable framework or constant region, to decrease antigenicity in a human are within the invention.

[1401] An effectively human protein is a protein that does substantially not evoke a neutralizing antibody response, e.g., the human anti-murine antibody (HAMA) response. HAMA can be problematic in a number of circumstances, e.g., if the antibody molecule is administered repeatedly, e.g., in treatment of a chronic or recurrent disease condition. A HAMA response can make repeated antibody administration potentially ineffective because of an increased antibody clearance from the serum (see, e.g., Saleh et al., Cancer Immunol. Immunother., 32:180-190 (1990)) and also because of potential allergic reactions (see, e.g., LoBuglio et al., Hybridoma, 5:5117-5123 (1986)).

[1402] Chimeric antibodies can be produced by recombinant DNA techniques known in the art (see Robinson et al., International Patent Publication PCT/US86/02269; Akira, et al., European Patent Application 184,187; Taniguchi, M., European Patent Application 171,496; Morrison et al., European Patent Application 173,494; Neuberger et al., International Application WO 86/01533; Cabilly et al. U.S. Pat. No. 4,816,567; Cabilly et al., European Patent Application 125,023; Better et al. (1988 Science 240:1041-1043); Liu et al. (1987) PNAS 84:3439-3443; Liu et al., 1987, J. Immunol. 139:3521-3526; Sun et al. (1987) PNAS 84:214-218; Nishimura et al., 1987, Canc. Res. 47:999-1005; Wood et al. (1985) Nature 314:446-449; and Shaw et al., 1988, J. Natl Cancer Inst. 80:1553-1559).

[1403] A humanized or CDR-grafted antibody will have at least one or two but generally all three recipient CDRs (of heavy and or light immuoglobulin chains) replaced with a donor CDR. The antibody may be replaced with at least a portion of a non-human CDR or only some of the CDRs may be replaced with non-human CDRs. It is only necessary to replace the number of CDRs required for binding of the humanized antibody to the target, e.g., tau. Preferably, the donor will be a rodent antibody, e.g., a rat or mouse antibody, and the recipient will be a human framework or a human consensus framework. Typically, the immunoglobulin providing the CDRs is called the donor and the immunoglobulin providing the framework is called the acceptor. In some embodiments, the donor immunoglobulin is a non-human (e.g., rodent). The acceptor framework is a naturally-occurring (e.g., a human) framework or a consensus framework, or a sequence about 85% or higher, preferably 90%, 95%, 99% or higher identical thereto.

[1404] In some embodiments, the consensus sequence refers to the sequence formed from the most frequently occurring amino acids (or nucleotides) in a family of related sequences (See e.g., Winnaker, From Genes to Clones (Verlagsgesellschaft, Weinheim, Germany 1987). In a family of proteins, each position in the consensus sequence is occupied by the amino acid occurring most frequently at that position in the family. If two amino acids occur equally frequently, either can be included in the consensus sequence. In some embodiments, the consensus framework refers to the framework region in the consensus immunoglobulin sequence.

[1405] An antibody can be humanized by methods known in the art (see e.g., Morrison, S. L., 1985, Science 229:1202-1207, by Oi et al., 1986, BioTechniques 4:214, and by Queen et al. U.S. Pat. Nos. 5,585,089, 5,693,761 and 5,693,762, the contents of all of which are hereby incorporated by reference).

[1406] Humanized or CDR-grafted antibodies can be produced by CDR-grafting or CDR substitution, wherein one, two, or all CDRs of an immunoglobulin chain can be replaced. See e.g., U.S. Pat. No. 5,225,539; Jones et al. 1986 Nature 321:552-525; Verhoeyan et al. 1988 Science 239:1534; Beidler et al. 1988 J. Immunol. 141:4053-4060; Winter U.S. Pat. No. 5,225,539, the contents of all of which are hereby expressly incorporated by reference. Winter describes a CDR-grafting method which may be used to prepare the humanized antibodies of the present invention (UK Patent Application GB 2188638A, filed on Mar. 26, 1987; Winter U.S. Pat. No. 5,225,539), the contents of which is expressly incorporated by reference.

[1407] In some embodiments, the encoded antibodies comprise the sequences of humanized antibodies in which specific amino acids have been substituted, deleted or added. Criteria for selecting amino acids from the donor are described in U.S. Pat. No. 5,585,089, e.g., columns 12-16 of U.S. Pat. No. 5,585,089, e.g., columns 12-16 of U.S. Pat. No. 5,585,089, the contents of which are hereby incorporated by reference. Other techniques for humanizing antibodies are described in Padlan et al. EP 519596 A1, published on Dec. 23, 1992.

[1408] In some embodiments, the encoded antibody molecule can be a single chain antibody. A single-chain antibody (scFV) may be engineered (see, for example, Colcher, D. et al. (1999) Ann N Y Acad Sci 880:263-80; and Reiter, Y. (1996) Clin Cancer Res 2:245-52). The single chain antibody can be dimerized or multimerized to generate multivalent antibodies having specificities for different epitopes of the same target protein.

[1409] In yet other embodiments, the antibody molecule has a heavy chain constant region chosen from, e.g., the heavy chain constant regions of IgG1, IgG2, IgG3, IgG4, IgM, IgA1, IgA2, IgD, and IgE; particularly, chosen from, e.g., the (e.g., human) heavy chain constant regions of IgG1, IgG2, IgG3, and IgG4. In another embodiment, the antibody molecule has a light chain constant region chosen from, e.g., the (e.g., human) light chain constant regions of kappa or lambda. The constant region can be altered, e.g., mutated, to modify the properties of the antibody (e.g., to increase or decrease one or more of: Fc receptor binding, antibody glycosylation, the number of cysteine residues, effector cell function, and/or complement function). In some embodiments the antibody has: effector function; and can fix complement. In other embodiments the antibody does not recruit effector cells; or fix complement. In other embodiments, the antibody has reduced or no ability to bind an Fc receptor. For example, it is an isotype or subtype, fragment or other mutant, which does not support binding to an Fc receptor, e.g., it has a mutagenized or deleted Fc receptor binding region.

[1410] Methods for altering an antibody constant region are known in the art. Antibodies with altered function, e.g. altered affinity for an effector ligand, such as FcR on a cell, or the C1 component of complement can be produced by replacing at least one amino acid residue in the constant portion of the antibody with a different residue (see e.g., EP 388,151 A1, U.S. Pat. Nos. 5,624,821 and 5,648,260, the contents of all of which are hereby incorporated by reference). Similar type of alterations could be described which if applied to the murine, or other species immunoglobulin would reduce or eliminate these functions.

[1411] An antibody molecule can be derivatized or linked to another functional molecule (e.g., another peptide or protein). In some embodiments, a derivatized antibody molecule is one that has been modified. Methods of derivatization include but are not limited to the addition of a fluorescent moiety, a radionucleotide, a toxin, an enzyme or an affinity ligand such as biotin. In some embodiments, the nucleic acid sequence comprising the transgene encoding the antibody molecule further encodes a fluorescent moiety, a radionucleotide, a toxin, an enzyme or an affinity ligand such as biotin. Accordingly, the encoded antibody molecules of the invention are intended to include derivatized and otherwise modified forms of the antibodies described herein, including immunoadhesion molecules. For example, an encoded antibody molecule can be functionally linked (by genetic fusion or otherwise) to one or more other molecular entities, such as another antibody (e.g., a bispecific antibody or a diabody), a detectable agent, a cytotoxic agent, a pharmaceutical agent, and/or a protein or peptide that can mediate association of the antibody or antibody portion with another molecule (such as a streptavidin core region or a polyhistidine tag). In some embodiments, the nucleic acid sequence comprising the transgene encoding the antibody molecule further encodes a another antibody (e.g., a bispecific antibody or a diabody), a detectable agent, a cytotoxic agent, a pharmaceutical agent, and/or a protein or peptide that can mediate association of the antibody or antibody portion with another molecule (e.g., a tag, e.g., a tag described herein).

[1412] Payload regions may encode polypeptides that form or function as any antibody, including antibodies that are known in the art and/or antibodies that are commercially available. The encoded antibodies may be therapeutic, diagnostic, or for research purposes. Further, polypeptides may include fragments of such antibodies or antibodies that have been developed to comprise one or more of such fragments (e.g., variable domains or complementarity determining regions (CDRs))

### Multispecific Antibody Molecules

[1413] In some embodiments, the encoded antibody molecule is a multispecific antibody molecule, e.g., it comprises a plurality of immunoglobulin variable domains sequences, wherein a first immunoglobulin variable domain sequence of the plurality has binding specificity for a first epitope and a second immunoglobulin variable domain sequence of the plurality has binding specificity for a second epitope. In some embodiments, the first and second epitopes are on the same antigen, e.g., the same protein (or subunit of a multimeric protein). In some embodiments, the first and second epitopes overlap. In some embodiments, the first and second epitopes do not overlap. In some embodiments, the first and second epitopes are on different antigens, e.g., the different proteins (or different subunits of a multimeric protein). In some embodiments, a multispecific antibody molecule comprises a third, fourth or fifth immunoglobulin variable domain. In some embodiments, a multispecific antibody molecule is a bispecific antibody molecule, a trispecific antibody molecule, or tetraspecific antibody molecule. In some embodiments, the encoded anti-tau molecule is a multispecific antibody molecule.

[1414] In some embodiments, an encoded multispecific antibody molecule is an encoded bispecific antibody molecule. A bispecific antibody has specificity for no more than two antigens. A bispecific antibody molecule is characterized by a first immunoglobulin variable domain sequence which has binding specificity for a first epitope and a second immunoglobulin variable domain sequence that has binding specificity for a second epitope. In some embodiments, the first and second epitopes are on the same antigen, e.g., the same protein (or subunit of a multimeric protein). In some embodiments, the first and second epitopes overlap. In some embodiments, the first and second epitopes do not overlap. In some embodiments, the first and second epitopes are on different antigens, e.g., the different proteins (or different subunits of a multimeric protein). In some embodiments, a bispecific antibody molecule comprises a heavy chain variable domain sequence and a light chain variable domain sequence which have binding specificity for a first epitope and a heavy chain variable domain sequence and a light chain variable domain sequence which have binding specificity for a second epitope. In some embodiments, a bispecific antibody molecule comprises a half antibody having binding specificity for a first epitope and a half antibody having binding specificity for a second epitope. In some embodiments, a bispecific antibody molecule comprises a half antibody, or fragment thereof, having binding specificity for a first epitope and a half antibody, or fragment thereof, having binding specificity for a second epitope. In some embodiments, a bispecific antibody molecule comprises a scFv, or fragment thereof, have binding specificity for a first epitope and a scFv, or fragment thereof, have binding specificity for a second epitope. In some embodiment, the encoded anti-tau antibody is a bispecific antibody molecule.

[1415] In another aspect, the invention relates to a multispecific, e.g., bispecific (e.g., biparatopic), antibody molecule comprising one or more tau antigen binding domains, such as but not limited to an anti-tau antibody molecule or fragment comprising one or more CDRs, VH, heavy chain, VL, and/or light chain thereof. Non-limiting anti-tau antibody molecule sequences are provided in Tables 7-16.

[1416] In some embodiments, the antibody molecule encoded by a transgene described herein is an anti-tau bispecific antibody molecule. In some embodiments, the anti-tau bispecific antibody molecule is monovalent or bivalent. In some embodiments, the anti-tau bispecific antibody molecule is a biparatopic antibody molecule. In some embodiments, the anti-tau bispecific antibody molecule comprises an Fc region or a variant thereof, e.g., as provided in Table 17. In some embodiments, the Fc region has reduced, e.g., ablated, affinity for an Fc receptor, e.g., an Fc receptor described herein. In some embodiments, the reduced affinity is compared to an otherwise similar antibody with a wild type Fc region. In some embodiments, the Fc receptor comprises a mutation at one or more of (e.g., all of) positions I253 (e.g., 1235A), H310 (e.g., H310A or H310Q), and/or H435 (e.g., H435A or H435Q), numbered according to the EU index as in Kabat. In some embodiments, a bispecific antibody molecule described herein comprises a variant Fc region with reduced effector function (e.g., reduced ADCC). In some embodiments, the Fc region comprises a mutation at one or more of (e.g., all of) positions L235 (e.g., L235V), F243 (e.g., F243L), R292 (e.g., R292P), Y300 (e.g., Y300L), and P396 (e.g., P396L), numbered according to the EU index as in Kabat.

[1417] In some embodiments, the first and/or second antigen binding domain comprise an IgG antibody, single-chain Fv (scFv), a scFv fragment, a Fab, a single-chain Fab (scFabs), a single-chain antibody, a diabody, an antibody variable domain, a VHH, a single domain antibody, and/or a nanobody.

[1418] In some embodiments, the first antigen binding domain (e.g., an scFv) is located at the N-terminus of the VL of the second binding domain (e.g., a full antibody, e.g., an IgG antibody), e.g., linked via a peptide linker. In some embodiments, a polypeptide of the bispecific antibody molecule comprises the following sequences, from N-terminal to C-terminal: VH of the first binding domain, first peptide linker (e.g., a (G4S)3 linker), VL of first binding domain, second peptide linker (e.g., a (G4S) linker), VL of the second binding domain and CL. In some embodiments, a polypeptide of the bispecific antibody molecule comprises the following sequences: from N-terminal to C-terminal: VH of the second binding domain, CH1, CH2, and CH3. In some embodiments, the bispecific antibody molecule comprises an Fc region that is mutated to have reduced binding to Fc receptor or reduced ADCC, e.g., an Fc region having the mutations L235V, F243L, R292P, Y300L, and P396L, numbered according to the EU index as in Kabat.

[1419] In some embodiments, the first antigen binding domain (e.g., an antibody mimetic, e.g., a designed ankyrin repeat protein (DARPIN)) is located at the N-terminus of the VL of the second binding domain (e.g., a full antibody, e.g., an IgG antibody), e.g., linked via a peptide linker. In some embodiments, a polypeptide of the bispecific antibody molecule comprises the following sequences, from N-terminal to C-terminal: an antibody mimetic, e.g., a designed ankyrin repeat protein (DARPIN), a peptide linker (e.g., a (G4S)3 linker), VL of the second binding domain and CL. In some embodiments, a polypeptide of the bispecific antibody molecule comprises the following sequences: from N-terminal to C-terminal: VH of the second binding domain, CH1, CH2, and CH3. In some embodiments, the bispecific antibody molecule comprises an Fc region that is mutated to have reduced binding to Fc receptor or reduced ADCC, e.g., an Fc region having the mutations L235V, F243L, R292P, Y300L, and P396L, numbered according to the EU index as in Kabat.

[1420] In some embodiments, the first antigen binding domain (e.g., a Fyn SH3-derived binding polypeptide (e.g., a fynomer)) is located at the N-terminus of the VL of the second binding domain (e.g., a full antibody, e.g., an IgG antibody), e.g., linked via a peptide linker. In some embodiments, a polypeptide of the bispecific antibody molecule comprises the following sequences, from N-terminal to C-terminal: a Fyn SH3-derived binding polypeptide, a peptide linker (e.g., a (G4S)3 linker), VL of the second binding domain and CL. In some embodiments, a polypeptide of the bispecific antibody molecule comprises the following sequences: from N-terminal to C-terminal: VH of the second binding domain, CH1, CH2, and CH3. In some embodiments, the bispecific antibody molecule comprises an Fc region that is mutated to have reduced binding to Fc receptor or reduced ADCC, e.g., an Fc region having the mutations L235V, F243L, R292P, Y300L, and P396L, numbered according to the EU index as in Kabat.

[1421] In a further aspect, the invention relates to a bispecific molecule comprising a first antigen binding site from a tau antibody of the invention as described herein above and a second antigen binding site with a different binding specificity, such as a binding specificity for a human effector cell, a human Fc receptor, a T cell receptor, a B cell receptor or a binding specificity for a non-overlapping epitope of tau, i.e. a bispecific antibody wherein the first and second antigen binding sites do not cross-block each other for binding to tau.

[1422] Exemplary bispecific antibody molecules of the invention comprise (i) two antibodies, one with a specificity to tau and another to a second target that are conjugated together, (ii) a single antibody that has one chain or arm specific to tau and a second chain or arm specific to a second molecule, (iii) two antibodies, one with a specificity for a first epitope of tau and another to a second epitope of tau that are conjugated together, wherein the first and second epitopes are distinct epitopes, (iv) a single antibody that has one chain or arm specific to a first epitope of tau and a second chain or arm specific to a second epitope of tau, wherein the first and second epitopes are distinct epitopes, (v) a single chain antibody that has specificity to tau and a second molecule (or another epitope of tau), e.g., via two scFvs linked in tandem by an extra peptide linker; (vi) a dual-variable-domain antibody (DVD-Ig), where each light chain and heavy chain contains two variable domains in tandem through a short peptide linkage (Wu et al., Generation and Characterization of a Dual Variable Domain Immunoglobulin (DVD-Ig™) Molecule, In: Antibody Engineering, Springer Berlin Heidelberg (2010)); (vii) a chemically-linked bispecific (Fab′)2 fragment; (viii) a Tandab, which is a fusion of two single chain diabodies resulting in a tetravalent bispecific antibody that has two binding sites for each of the target antigens; (ix) a flexibody, which is a combination of scFvs with a diabody resulting in a multivalent molecule; (x) a so called “dock and lock” molecule, based on the “dimerization and docking domain” in Protein Kinase A, which, when applied to Fabs, can yield a trivalent bispecific binding protein consisting of two identical Fab fragments linked to a different Fab fragment; (xi) a so-called Scorpion molecule, comprising, e.g., two scFvs fused to both termini of a human Fc-region; and (xii) a diabody. In one embodiment, the bispecific antibody of the present invention is a diabody.

[1423] In some embodiments, the sequences of the encoded antibody molecules of the present disclosure can be generated from bispecific or heterodimeric antibody molecules produced using protocols known in the art; including but not limited to, for example, the “knob in a hole” approach described in, e.g., U.S. Pat. No. 5,731,168; the electrostatic steering Fc pairing as described in, e.g., WO 09/089004, WO 06/106905 and WO 2010/129304; Strand Exchange Engineered Domains (SEED) heterodimer formation as described in, e.g., WO 07/110205; Fab arm exchange as described in, e.g., WO 08/119353, WO 2011/131746, and WO 2013/060867; double antibody conjugate, e.g., by antibody cross-linking to generate a bi-specific structure using a heterobifunctional reagent having an amine-reactive group and a sulfhydryl reactive group as described in, e.g., U.S. Pat. No. 4,433,059; bispecific antibody determinants generated by recombining half antibodies (heavy-light chain pairs or Fabs) from different antibodies through cycle of reduction and oxidation of disulfide bonds between the two heavy chains, as described in, e.g., U.S. Pat. No. 4,444,878; trifunctional antibodies, e.g., three Fab′ fragments cross-linked through sulfhdryl reactive groups, as described in, e.g., U.S. Pat. No. 5,273,743; biosynthetic binding proteins, e.g., pair of scFvs cross-linked through C-terminal tails preferably through disulfide or amine-reactive chemical cross-linking, as described in, e.g., U.S. Pat. No. 5,534,254; bifunctional antibodies, e.g., Fab fragments with different binding specificities dimerized through leucine zippers (e.g., c-fos and c-jun) that have replaced the constant domain, as described in, e.g., U.S. Pat. No. 5,582,996; bispecific and oligospecific mono- and oligovalent receptors, e.g., VH-CH1 regions of two antibodies (two Fab fragments) linked through a polypeptide spacer between the CH1 region of one antibody and the VH region of the other antibody typically with associated light chains, as described in, e.g., U.S. Pat. No. 5,591,828; bispecific DNA-antibody conjugates, e.g., crosslinking of antibodies or Fab fragments through a double stranded piece of DNA, as described in, e.g., U.S. Pat. No. 5,635,602; bispecific fusion proteins, e.g., an expression construct containing two scFvs with a hydrophilic helical peptide linker between them and a full constant region, as described in, e.g., U.S. Pat. No. 5,637,481; multivalent and multispecific binding proteins, e.g., dimer of polypeptides having first domain with binding region of Ig heavy chain variable region, and second domain with binding region of Ig light chain variable region, generally termed diabodies (higher order structures are also disclosed creating bispecific, trispecific, or tetraspecific molecules, as described in, e.g., U.S. Pat. No. 5,837,242; minibody constructs with linked VL and VH chains further connected with peptide spacers to an antibody hinge region and CH3 region, which can be dimerized to form bispecific/multivalent molecules, as described in, e.g., U.S. Pat. No. 5,837,821; VH and VL domains linked with a short peptide linker (e.g., 5 or 10 amino acids) or no linker at all in either orientation, which can form dimers to form bispecific diabodies; trimers and tetramers, as described in, e.g., U.S. Pat. No. 5,844,094; String of VH domains (or VL domains in family members) connected by peptide linkages with crosslinkable groups at the C-terminus further associated with VL domains to form a series of FVs (or scFvs), as described in, e.g., U.S. Pat. No. 5,864,019; and single chain binding polypeptides with both a VH and a VL domain linked through a peptide linker are combined into multivalent structures through non-covalent or chemical crosslinking to form, e.g., homobivalent, heterobivalent, trivalent, and tetravalent structures using both scFV or diabody type format, as described in, e.g., U.S. Pat. No. 5,869,620. Additional exemplary multispecific and bispecific molecules and methods of making the same are found, for example, in U.S. Pat. Nos. 5,910,573, 5,932,448, 5,959,083, 5,989,830, 6,005,079, 6,239,259, 6,294,353, 6,333,396, 6,476,198, 6,511,663, 6,670,453, 6,743,896, 6,809,185, 6,833,441, 7,129,330, 7,183,076, 7,521,056, 7,527,787, 7,534,866, 7,612,181, US2002/004587A1, US2002/076406A1, US2002/103345A1, US2003/207346A1, US2003/211078A1, US2004/219643A1, US2004/220388A1, US2004/242847A1, US2005/003403A1, US2005/004352A1, US2005/069552A1, US2005/079170A1, US2005/100543A1, US2005/136049A1, US2005/136051A1, US2005/163782A1, US2005/266425A1, US2006/083747A1, US2006/120960A1, US2006/204493A1, US2006/263367A1, US2007/004909A1, US2007/087381A1, US2007/128150A1, US2007/141049A1, US2007/154901A1, US2007/274985A1, US2008/050370A1, US2008/069820A1, US2008/152645A1, US2008/171855A1, US2008/241884A1, US2008/254512A1, US2008/260738A1, US2009/130106A1, US2009/148905A1, US2009/155275A1, US2009/162359A1, US2009/162360A1, US2009/175851A1, US2009/175867A1, US2009/232811A1, US2009/234105A1, US2009/263392A1, US2009/274649A1, EP346087A2, WO00/06605A2, WO02/072635A2, WO04/081051A1, WO06/020258A2, WO2007/044887A2, WO2007/095338A2, WO2007/137760A2, WO2008/119353A1, WO2009/021754A2, WO2009/068630A1, WO91/03493A1, WO93/23537A1, WO94/09131A1, WO94/12625A2, WO95/09917A1, WO96/37621A2, WO99/64460A1. The contents of the above-referenced applications are incorporated herein by reference in their entireties.

[1424] In some embodiments, the encoded antibody molecule is a bispecific Fynomer-antibody fusion protein, e.g., it comprises a plurality of immunoglobulin variable domains sequences with one of more Fynomers fused to any of the light- or heavy-chain termini, wherein a first immunoglobulin variable domain sequence of the plurality has binding specificity for a first epitope and the Fynomer has binding specificity for a second epitope. In some embodiments, the first and second epitopes are on the same antigen, e.g., the same protein (or subunit of a multimeric protein). In some embodiments, the first and second epitopes overlap. In some embodiments, the first and second epitopes do not overlap. In some embodiments, the first and second epitopes are on different antigens, e.g., the different proteins (or different subunits of a multimeric protein). In some embodiments, the encoded anti-tau molecule is a multispecific Fynomer-antibody fusion molecule. Fynomers that bind a target of interest can routinely be selected using recombinant technology as described for example, in Grbulovski et al., J. Biol. Chem. 282(5) 3196-3204 (2007) and WO 2008/022759. Methods for forming Fynomer-antibody fusion proteins are known in the art including, for example, Brack et al. (2014), Mol Cancer Ther 13(8):2030-2039, US2017/0281768, US2015/0105285A1, WO2014/170063A1, WO2015/141862A1, WO2013/135588A1, U.S. Ser. No. 10/996,226B2, U.S. Pat. No. 9,989,536B2, U.S. Pat. No. 9,689,879B2, U.S. Pat. No. 9,513,296B2, U.S. Ser. No. 10/323,095B2, and U.S. Pat. No. 9,593,314B2.

[1425] This present disclosure provides in some embodiments, a nucleic acid (e.g., an isolated nucleic acid) comprising a transgene encoding a payload comprising any of the above antibody molecules and genetic elements, AAV vectors, and AAV particles comprising the same.

### Chimeric Antigen Receptors

[1426] In some embodiments, the nucleic acid comprises a transgene encoding a payload (e.g., an antibody molecule that can be used to generate a chimeric antigen receptor (CAR) or a cell expressing a CAR (e.g., a CAR-expressing cell). The CAR may comprise i) an extracellular antigen binding domain, ii) a transmembrane domain, and iii) an intracellular signaling domain (which may comprise one or both of a primary signaling domain and a costimulatory domain). The CAR may further comprise a leader sequence and/or a hinge sequence. In specific embodiments, the CAR construct comprises a scFv domain, wherein the scFv may be preceded by an optional leader sequence, and followed by an optional hinge sequence, a transmembrane region, and an intracellular signaling domain, e.g., wherein the domains are contiguous with and in the same reading frame to form a single fusion protein.

[1427] The antigen binding domain of the CAR can be any domain that binds to the antigen including but not limited to a monoclonal antibody, a polyclonal antibody, a recombinant antibody, a human antibody, a humanized antibody, and a functional fragment thereof, including but not limited to a single-domain antibody such as a heavy chain variable domain (VH), a light chain variable domain (VL) and a variable domain (VHH) of camelid derived nanobody, and to an alternative scaffold known in the art to function as antigen binding domain, such as a recombinant fibronectin domain, a T cell receptor (TCR), or a fragment there of, e.g., single chain TCR, and the like. In some instances, it is beneficial for the antigen binding domain to be derived from the same species in which the CAR will ultimately be used in. For example, for use in humans, it may be beneficial for the antigen binding domain of the CAR to comprise human or humanized residues for the antigen binding domain of an antibody or antibody fragment. In some embodiments, the antigen binding domain of the CAR is an scFv antibody fragment that is humanized compared to the murine sequence of the scFv from which it is derived.

[1428] In some embodiments, a CAR can be used in the treatment of disease categories which include for example, cancer, autoimmune disorders, B-cell mediated diseases, inflammatory diseases, neuronal disorders, cardiovascular disease and circulatory disorders, or infectious diseases.

### Miniaturized Antibody

[1429] In some embodiments, the antibody encoded by the payloads may be a “miniaturized” antibody. Among the best examples of mAb miniaturization are the small modular immunopharmaceuticals (SMIPs) from Trubion Pharmaceuticals. These molecules, which can be monovalent or bivalent, are recombinant single-chain molecules containing one VL, one VH antigen-binding domain, and one or two constant “effector” domains, all connected by linker domains. Presumably, such a molecule might offer the advantages of increased tissue or tumor penetration claimed by fragments while retaining the immune effector functions conferred by constant domains. At least three “miniaturized” SMIPs have entered clinical development. TRU-015, an anti-CD20 SMIP developed in collaboration with Wyeth, is the most advanced project, having progressed to Phase 2 for rheumatoid arthritis (RA). Earlier attempts in systemic lupus erythrematosus (SLE) and B cell lymphomas were ultimately discontinued. Trubion and Facet Biotechnology are collaborating in the development of TRU-016, an anti-CD37 SMIP, for the treatment of CLL and other lymphoid neoplasias, a project that has reached Phase 2. Wyeth has licensed the anti-CD20 SMIP SBI-087 for the treatment of autoimmune diseases, including RA, SLE, and possibly multiple sclerosis, although these projects remain in the earliest stages of clinical testing. (Nelson, A. L., MAbs. 2010. Jan-Feb; 2(1):77-83).

### Diabody

[1430] In some embodiments, payloads may encode diabodies. Diabodies are functional bispecific single-chain antibodies (bscAb). These bivalent antigen-binding molecules are composed of non-covalent dimers of scFvs, and can be produced in mammalian cells using recombinant methods. (See, e.g., Mack et al, Proc. Natl. Acad. Sci., 92: 7021-7025, 1995). Few diabodies have entered clinical development. An iodine-123-labeled diabody version of the anti-CEA chimeric antibody cT84.66 has been evaluated for pre-surgical immunoscintigraphic detection of colorectal cancer in a study sponsored by the Beckman Research Institute of the City of Hope (Clinicaltrials.gov NCT00647153) (Nelson, A. L., MAbs., 2010. Jan-Feb; 2(1):77-83).

### Unibody

[1431] In some embodiments, payloads may encode a “unibody,” in which the hinge region has been removed from IgG4 molecules. While IgG4 molecules are unstable and can exchange light-heavy chain heterodimers with one another, deletion of the hinge region prevents heavy chain-heavy chain pairing entirely, leaving highly specific monovalent light/heavy heterodimers, while retaining the Fc region to ensure stability and half-life in vivo. This configuration may minimize the risk of immune activation or oncogenic growth, as IgG4 interacts poorly with FcRs and monovalent unibodies fail to promote intracellular signaling complex formation. These contentions are, however, largely supported by laboratory, rather than clinical, evidence. Other antibodies may be “miniaturized” antibodies, which are compacted 100 kDa antibodies (see, e.g., Nelson, A. L., MAbs., 2010. Jan-Feb; 2(1):77-83).

### Intrabody

[1432] In some embodiments, payloads may encode intrabodies. Intrabodies are a form of antibody that is not secreted from a cell in which it is produced, but instead targets one or more intracellular proteins. Intrabodies are expressed and function intracellularly, and may be used to affect a multitude of cellular processes including, but not limited to intracellular trafficking, transcription, translation, metabolic processes, proliferative signaling and cell division. In some embodiments, methods described herein include intrabody-based therapies. In some such embodiments, variable domain sequences and/or CDR sequences disclosed herein are incorporated into one or more constructs for intrabody-based therapy. For example, intrabodies may target one or more glycated intracellular proteins or may modulate the interaction between one or more glycated intracellular proteins and an alternative protein.

[1433] More than two decades ago, intracellular antibodies against intracellular targets were first described (Biocca, Neuberger and Cattaneo EMBO J. 9: 101-108, 1990). The intracellular expression of intrabodies in different compartments of mammalian cells allows blocking or modulation of the function of endogenous molecules (Biocca, et al., EMBO J. 9: 101-108, 1990; Colby et al., Proc. Natl. Acad. Sci. U.S.A. 101: 17616-21, 2004). Intrabodies can alter protein folding, protein-protein, protein-DNA, protein-RNA interactions and protein modification. They can induce a phenotypic knockout and work as neutralizing agents by direct binding to the target antigen, by diverting its intracellular trafficking or by inhibiting its association with binding partners. They have been largely employed as research tools and are emerging as therapeutic molecules for the treatment of human diseases such as viral pathologies, cancer and misfolding diseases. The fast-growing bio-market of recombinant antibodies provides intrabodies with enhanced binding specificity, stability, and solubility, together with lower immunogenicity, for their use in therapy (Biocca, abstract in Antibody Expression and Production Cell Engineering Volume 7, 2011, pp. 179-195).

[1434] In some embodiments, intrabodies have advantages over interfering RNA (iRNA); for example, iRNA has been shown to exert multiple non-specific effects, whereas intrabodies have been shown to have high specificity and affinity to target antigens. Furthermore, as proteins, intrabodies possess a much longer active half-life than iRNA. Thus, when the active half-life of the intracellular target molecule is long, gene silencing through iRNA may be slow to yield an effect, whereas the effects of intrabody expression can be almost instantaneous. Lastly, it is possible to design intrabodies to block certain binding interactions of a particular target molecule, while sparing others.

[1435] Intrabodies are often single chain variable fragments (scFvs) expressed from a recombinant nucleic acid molecule and engineered to be retained intracellularly (e.g., retained in the cytoplasm, endoplasmic reticulum, or periplasm). Intrabodies may be used, for example, to ablate the function of a protein to which the intrabody binds. The expression of intrabodies may also be regulated through the use of inducible promoters in the nucleic acid expression vector comprising the intrabody. Intrabodies may be produced for use in the viral genomes using methods known in the art, such as those disclosed and reviewed in: (Marasco et al., 1993 Proc. Natl. Acad. Sci. USA, 90: 7889-7893; Chen et al., 1994, Hum. Gene Ther. 5:595-601; Chen et al., 1994, Proc. Natl. Acad. Sci. USA, 91: 5932-5936; Maciejewski et al., 1995, Nature Med., 1: 667-673; Marasco, 1995, Immunotech, 1: 1-19; Mhashilkar, et al., 1995, EMBO J. 14: 1542-51; Chen et al., 1996, Hum. Gene Therap., 7: 1515-1525; Marasco, Gene Ther. 4:11-15, 1997; Rondon and Marasco, 1997, Annu. Rev. Microbiol. 51:257-283; Cohen, et al., 1998, Oncogene 17:2445-56; Proba et al., 1998, J. Mol. Biol. 275:245-253; Cohen et al., 1998, Oncogene 17:2445-2456; Hassanzadeh, et al., 1998, FEBS Lett. 437:81-6; Richardson et al., 1998, Gene Ther. 5:635-44; Ohage and Steipe, 1999, J. Mol. Biol. 291:1119-1128; Ohage et al., 1999, J. Mol. Biol. 291:1129-1134; Wirtz and Steipe, 1999, Protein Sci. 8:2245-2250; Zhu et al., 1999, J. Immunol. Methods 231:207-222; Arafat et al., 2000, Cancer Gene Ther. 7:1250-6; der Maur et al., 2002, J. Biol. Chem. 277:45075-85; Mhashilkar et al., 2002, Gene Ther. 9:307-19; and Wheeler et al., 2003, FASEB J. 17: 1733-5; and references cited therein). In particular, a CCR5 intrabody has been produced by Steinberger et al., 2000, Proc. Natl. Acad. Sci. USA 97:805-810). See generally Marasco, WA, 1998, “Intrabodies: Basic Research and Clinical Gene Therapy Applications” Springer: New York; and for a review of scFvs, see Pluckthun in “The Pharmacology of Monoclonal Antibodies,” 1994, vol. 113, Rosenburg and Moore eds. Springer-Verlag, New York, pp. 269-315.

[1436] Sequences from donor antibodies may be used to develop intrabodies. Intrabodies are often recombinantly expressed as single domain fragments such as isolated VH and VL domains or as a single chain variable fragment (scFv) antibody within the cell. For example, intrabodies are often expressed as a single polypeptide to form a single chain antibody comprising the variable domains of the heavy and light chains joined by a flexible linker polypeptide. Intrabodies typically lack disulfide bonds and are capable of modulating the expression or activity of target genes through their specific binding activity. Single chain antibodies can also be expressed as a single chain variable region fragment joined to the light chain constant region.

[1437] As is known in the art, an intrabody can be engineered into recombinant polynucleotide vectors to encode sub-cellular trafficking signals at its N or C terminus to allow expression at high concentrations in the sub-cellular compartments where a target protein is located. For example, intrabodies targeted to the endoplasmic reticulum (ER) are engineered to incorporate a leader peptide and, optionally, a C-terminal ER retention signal, such as the KDEL amino acid motif (SEQ ID NO: 4545). Intrabodies intended to exert activity in the nucleus are engineered to include a nuclear localization signal. Lipid moieties are joined to intrabodies in order to tether the intrabody to the cytosolic side of the plasma membrane. Intrabodies can also be targeted to exert function in the cytosol. For example, cytosolic intrabodies are used to sequester factors within the cytosol, thereby preventing them from being transported to their natural cellular destination.

[1438] There are certain technical challenges with intrabody expression. In particular, protein conformational folding and structural stability of the newly synthesized intrabody within the cell is affected by reducing conditions of the intracellular environment.

[1439] Intrabodies may be promising therapeutic agents for the treatment of misfolding diseases, including tauopathies, prion diseases, Alzheimer's, Parkinson's, and Huntington's, because of their virtually infinite ability to specifically recognize the different conformations of a protein, including pathological isoforms, and because they can be targeted to the potential sites of aggregation (both intra- and extracellular sites). These molecules can work as neutralizing agents against amyloidogenic proteins by preventing their aggregation, and/or as molecular shunters of intracellular traffic by rerouting the protein from its potential aggregation site (Cardinale, and Biocca, Curr. Mol. Med. 2008, 8:2-11).

### Maxibody

[1440] In some embodiments, the payloads encode a maxibody (bivalent scFv fused to the amino terminus of the Fc (CH2-CH3 domains) of IgG.

### Exemplary Payload Antibodies

[1441] In some embodiments, the payload region of the AAV particle comprises one or more nucleic acid sequences encoding anti-tau antibody molecules, e.g., an anti-tau antibody molecule described herein. Human tau can have, for example, the following sequence:

(isoform 2; SEQ ID NO: 9200)
MAEPRQEFEVMEDHAGTYGLGDRKDQGGYTMHQDQEGDTDAGLKES
PLQTPTEDGSEEPGSETSDAKSTPTAEDVTAPLVDEGAPGKQAAA
QPHTEIPEGTTAEEAGIGDTPSLEDEAAGHVTQARMVSKSKDGTG
SDDKKAKGADGKIKIATPRGAAPPGQKGQANATRIPAKTPPAPKT
PPSSGEPPKSGDRSGYSSPGSPGTPGSRSRTPSLPTPPTREPKKV
AVVRTPPKSPSSAKSRLQTAPVPMPDLKNVKSKIGSTENLKHQPG
GGKVQIINKKLDLSNVQSKCGSKDNIKHVPGGGSVQIVYKPVDLS
KVTSKCGSLGNIHHKPGGGQVEVKSEKLDFKDRVQSKIGSLDNIT
HVPGGGNKKIETHKLTFRENAKAKTDHGAEIVYKSPVVSGDTSPR
HLSNVSSIGSIDMVDSPQLATLADEVSASLAKQGL

[1442] In some embodiments, the anti-tau antibody molecule is specific for one or more epitopes or phosphorylated Ser and/or Thr residues in tau (e.g., human tau), for example, in the N-terminal, mid-, and/or C-terminal domains of tau. In some embodiments, the anti-tau antibody molecule is specific for one or more epitopes or phosphorylated Ser and/or Thr residues in the N-terminal domain of tau (such as the N-terminal domain N-terminal to the 1N domain, or residues 15-25 or 1 to about 50 of the human tau protein). In some embodiments, the anti-tau antibody molecule is specific for one or more epitopes or phosphorylated Ser and/or Thr residues in the mid-domain of tau (such as the mid-domain comprising, consisting essentially, or consisting of residues between the 2N and R1 domains, or residues above 95 to about 250 of the human tau protein). In some embodiments, the anti-tau antibody molecule is specific for one or more epitopes or phosphorylated Ser and/or Thr residues in the C-terminal domain of tau (such as the C-terminal domain comprising, consisting essentially, or consisting of residues C-terminal to the R4 domain, or residues about 370 to 441 of the human tau protein).

[1443] Exemplary and non-limiting N-terminal domain epitopes include amino acid residues (a) 9-18, (b) 15-25, (c) 25-30, and (d) 15-30 of human tau (e.g., numbered according to SEQ ID NO: 9200). Accordingly, in some embodiments, the anti-tau antibody molecule described herein binds to all or a portion of (e.g., one or more residues within) amino acid residues (a) 9-18, (b) 15-25, (c) 25-30, and/or (d) 15-30 of human tau (e.g., numbered according to SEQ ID NO: 9200).

[1444] Exemplary and non-limiting mid-domain epitopes include amino acid residues (a) 125-131, (b) 204-222, (c) 234-246, (d) 234-259, and (e) 235-246 of human tau (e.g., numbered according to SEQ ID NO: 9200). Accordingly, in some embodiments, the anti-tau antibody molecule described herein binds to all or a portion of (e.g., one or more residues within) amino acid residues (a) 125-131, (b) 204-222, (c) 234-246, (d) 234-259, and/or (e) 235-246 of human tau (e.g., numbered according to SEQ ID NO: 9200).

[1445] Exemplary and non-limiting mid-domain epitopes include pT181, pS199, pS202, pT205, pT212, pS214, pT217, pT231, pS234, pS235, pS258, and pS259 of human tau (e.g., numbered according to SEQ ID NO: 9200).

[1446] Exemplary and non-limiting C-terminal domain epitopes include amino acid residues (a) 387-408 and (b) 409-436 of human tau (e.g., numbered according to SEQ ID NO: 9200). Accordingly, in some embodiments, the anti-tau antibody molecule described herein binds to all or a portion of (e.g., one or more residues within) amino acid residues (a) 387-408 and/or (b) 409-436 of human tau (e.g., numbered according to SEQ ID NO: 9200).

[1447] Exemplary and non-limiting C-terminal domain epitopes include pS396, pS404, and/or pS409 of human tau (e.g., numbered according to SEQ ID NO: 9200).

[1448] In certain embodiments, the antibody molecule recognizes a 3D conformation epitope with residues not contiguous on the primary sequence.

[1449] In some embodiments, the anti-tau antibody molecule binds to the N-terminal domain of human tau, e.g., an N-terminal domain epitope on human tau. In some embodiments, the N-terminal domain of human tau spans amino acid residues 1-103 of human tau. Exemplary and non-limiting N-terminal domain-binding antibodies include IPN002 and those disclosed in WO2018/106781, WO2015/200806, WO2014/165271, WO2017/191559, WO2014/028777, WO2015/197820, WO2019/110571, and WO2017/191561, the contents of all of which are herein incorporated by reference in their entirety, and antibodies that either bind to the same epitope as or compete for binding with the aforementioned antibodies.

[1450] In some embodiments, the anti-tau antibody molecule binds to the mid-domain of human tau, e.g., a mid-domain epitope on human tau. In some embodiments, the mid-domain of human tau spans amino acid residues 103-244 of human tau, and optionally may include the microtubule binding region, which spans amino acid residues 244-369 of human tau. Exemplary and non-limiting mid-domain-binding antibodies include AT8, PT3, UCB, PT76, and those disclosed in WO2017/191561, WO2014/028777, WO2015/120364, WO2015/122922, WO2004/016655, WO2014/152157, WO2015/197823, WO2018/170351, WO2019/171258, WO2019/171259, WO2021/205359, WO2017/005732, WO2017/005732, WO2019/094595, WO2022/144406, WO2012/149365, WO2017/005734, U.S. Pat. No. 7,176,290, WO2013/041962, WO2016/079597, WO2020/097561, WO2020/180819, WO2015/197820, WO2018/178077, WO2019/077500, and WO2012/149365, and antibodies that either bind to the same epitope as or compete for binding with the aforementioned antibodies.

[1451] In some embodiments, the anti-tau antibody molecule binds to the microtubule-binding region of human tau, e.g., a microtubule-binding region epitope on human tau. In some embodiments, the microtubule binding region spans amino acid residues 244-369 of human tau. Exemplary and non-limiting microtubule-binding region binding antibodies include WO2017/005734, U.S. Pat. No. 7,176,290, WO2013/041962, WO2016/079597, WO2020/097561, WO2020/180819, WO2015/197820, WO2018/178077, WO2019/077500, and WO2012/149365, and antibodies that either bind to the same epitope as or compete for binding with the aforementioned antibodies.

[1452] In some embodiments, the anti-tau antibody molecule binds to the C-terminal domain of human tau, e.g., a C-terminal domain epitope on human tau. In some embodiments, the N-terminal domain of human tau spans amino acid residues 1-103 of human tau. Exemplary and non-limiting C-terminal domain-binding antibodies include PHF1, C10.2, and those disclosed in US20070280935, WO2010/142423, WO2015/091656, WO2015/114538, WO2015/197735, WO2016/207245, WO2012/045882, WO2013/050567, WO2013/151762, WO2012/106363, WO2013/180238, WO2014/096321, WO2014/150877, WO2017/009308, WO2018/127519, WO2017/191560, U.S. Ser. No. 10/556,950, WO2020/201828, and WO2021/262791, and antibodies that either bind to the same epitope as or compete for binding with the aforementioned antibodies.

[1453] In some embodiments, the anti-tau antibody molecule binds to a region that overlaps with the N-terminal domain and the mid-domain of human tau. Exemplary and non-limiting antibodies which bind to a region that overlaps with the N-terminal domain and the mid-domain of human tau include those disclosed in WO2017/191561 and WO2014/028777, and antibodies that either bind to the same epitope as or compete for the aforementioned antibodies.

[1454] In some embodiments, the anti-tau antibody molecule binds to a region that overlaps with the mid-domain and the microtubule-binding region of human tau. Exemplary and non-limiting antibodies which bind to a region that overlaps with the mid-domain and the microtubule-binding region of human tau include those described in WO2017/005734, and antibodies that either bind to the same epitope as or compete for binding with the aforementioned antibodies.

[1455] In some embodiments, the anti-tau antibody molecule binds to a region that overlaps with the mid-domain and the C-terminal domain of human tau. Exemplary and non-limiting antibodies which bind to a region that overlaps with the mid-domain and the C-terminal domain of human tau include those described in WO2012/149365, and antibodies that either bind to the same epitope as or compete for binding with the aforementioned antibodies.

[1456] In some embodiments, the anti-tau antibody molecule binds to all or a portion of (e.g., one or more residues within) amino acid residues (a) 32-49, (b) 55-76, (c) 57-72, (d) 159-194, (e) 175-191, (f) 185-200, (g) 219-247, (h) 223-238, (i) 381-426, (j) 383-400, (k) 409-436, and/or (1) 413-430 of human tau (SEQ ID NO: 9200). In some embodiments, the anti-tau antibody molecule competes for binding with an anti-tau antibody molecule which binds to all or a portion of (e.g., one or more residues within) amino acid residues (a) 32-49, (b) 55-76, (c) 57-72, (d) 159-194, (e) 175-191, (f) 185-200, (g) 219-247, (h) 223-238, (i) 381-426, (j) 383-400, (k) 409-436, and/or (1) 413-430 of human tau (SEQ ID NO: 9200). In some embodiments, the anti-tau antibody molecule binds to the same epitope as, substantially the same epitope as, an epitope that overlaps with, or an epitope that substantially overlaps with, an anti-tau antibody molecule which binds to all or a portion of (e.g., one or more residues within) amino acid residues (a) 32-49, (b) 55-76, (c) 57-72, (d) 159-194, (e) 175-191, (f) 185-200, (g) 219-247, (h) 223-238, (i) 381-426, 0) 383-400, (k) 409-436, and/or (1) 413-430 of human tau (SEQ ID NO: 9200).

[1457] Non-limiting examples of anti-tau antibody molecules suitable for use as a payload in the AAV particles described herein include, for example, one or more of the antibody molecules listed in Tables 7-16. As another non-limiting example, the payload region of the AAV particle comprises a nucleotide sequence encoding an antibody molecule which may comprise one or more of the HCDRs, VH sequences, or heavy chain sequences listed in Tables 7-16. As a further non-limiting example, the payload region of the AAV particle comprises a nucleotide sequence encoding an antibody molecule which may comprise one or more of the LCDRs, VL sequences, or light chain sequences listed in Tables 7-16. In yet a further non-limiting example, the payload region of the AAV particle comprises a nucleotide sequence encoding an antibody molecule which may comprise one or more of the HCDRs, VH sequences, or heavy chain sequences listed in Tables 7-16, and one or more of the LCDRs, VL sequences, or light chain sequences listed in Tables 7-16.

[1458] In some embodiments, the payload region may also comprise a linker between the VH and VL sequences, or between the heavy and light chain sequences. The linker may be a sequence known in the art or a linker described in Table 19.

[1459] In some embodiments, the payload region of the AAV particle comprises a nucleic acid sequence encoding a polypeptide comprising a VH sequence and a VL sequence, or a heavy chain sequence and a light chain sequence, from Tables 7-16, where the VH sequence or heavy chain sequence is from a different antibody than the VL sequence or light chain sequence.

[1460] In some embodiments, the payload region comprises, in the 5′ to 3′ direction, an antibody light chain sequence, a linker region, and a heavy chain sequence, or a VL sequence, a linker region, and a VH sequence. In another embodiment, the linker is not used.

[1461] In some embodiments, the payload region comprises a nucleic acid sequence encoding, in the 5′ to 3′ direction, an antibody light chain sequence, a linker region, and a heavy chain sequence, or a VL sequence, a linker region, and a VH sequence.

[1462] In some embodiments, the payload region comprises, in the 5′ to 3′ direction, an antibody heavy chain sequence, a linker region, and a light chain sequence, or a VH sequence, a linker region, and a VL sequence. In another embodiment, the linker is not used.

[1463] In some embodiments, the payload region comprises a nucleic acid sequence encoding, in the 5′ to 3′ direction, an antibody heavy chain sequence, a linker region, and a light chain sequence, or a VH sequence, a linker region, and a VL sequence.

[1464] In some embodiments, the payload region comprises a nucleic acid sequence encoding a single heavy chain. As a non-limiting example, the heavy chain is an amino acid sequence described in Tables 7-16.

[1465] In some embodiments, the payload region of the AAV particle comprises one or more nucleic acid sequences encoding one or more of the antibody molecules described herein (e.g., an antibody molecule listed in any one of Tables 7-16).

[1466] Shown in Tables 7-16 is a listing of antibody molecules and their polynucleotides and/or polypeptides sequences. These sequences may be encoded by or included in the AAV particles of the present disclosure. Variants or fragments of the antibody sequences described in Tables 7-16 may be utilized in the AAV particles of the present disclosure.

[1467] In some embodiments, the payload region of the AAV particle comprises a nucleic acid sequence encoding an antibody molecule with at least 50% identity, for example, at least 60%, at least 70%, at least 80%, at least 85%, at least 90%, at least 91%, at least 92%, at least 93%, at least 94%, at least 95%, at least 96%, at least 97%, at least 98%, at least 99%, or 100% identity to the amino acid sequence of one or more of the antibody molecules described herein (e.g., an antibody molecule listed in Tables 7-16).

[1468] In some embodiments, the payload region of the AAV particle comprises a nucleic acid sequence with at least 50% identity, for example, at least 60%, at least 70%, at least 80%, at least 85%, at least 90%, at least 91%, at least 92%, at least 93%, at least 94%, at least 95%, at least 96%, at least 97%, at least 98%, at least 99%, or 100% identity to one or more of the nucleotide sequences listed in Tables 7-16.

[1469] In some embodiments, the CDR region of the encoded antibody molecule may have at least 50% identity, for example, at least 60%, at least 70%, at least 80%, at least 85%, at least 90%, at least 91%, at least 92%, at least 93%, at least 94%, at least 95%, at least 96%, at least 97%, at least 98%, at least 99%, or 100% identity to at least one or more of the VCDR1, VCDR2, and/or VCDR3, and/or LCDR1, LCDR2, and/or LCDR3 (e.g., one, two, three, four, five, or all six CDRs) sequences of one or more of the antibody molecules described herein (e.g., an antibody molecule listed in Tables 7-16).

[1470] In some embodiments, the VH sequence and/or VL sequence of the antibody molecule has at least 50% identity, for example, at least 60%, at least 70%, at least 80%, at least 85%, at least 90%, at least 91%, at least 92%, at least 93%, at least 94%, at least 95%, at least 96%, at least 97%, at least 98%, at least 99%, or 100% identity to the amino acid sequence of the VH and/or VL sequences of one or more of the antibody molecules described herein (e.g., an antibody molecule listed in Tables 7-16).

[1471] In some embodiments, the heavy chain and/or light chain of the encoded antibody molecule has at least 50% identity, for example, at least 60%, at least 70%, at least 80%, at least 85%, at least 90%, at least 91%, at least 92%, at least 93%, at least 94%, at least 95%, at least 96%, at least 97%, at least 98%, at least 99%, or 100% identity to the amino acid sequence of the heavy chain and/or light chain of one or more of the antibody molecules described herein (e.g., an antibody molecule listed in Tables 7-16).

TABLE 7
Tau-associated disease antibodies

| | | Type | | | | SEQ |
|---|---|---|---|---|---|---|
| Ab | Compo- | (PRT/ | | | | ID |
| ID | nent | DNA) | Description | Reference | Length | NO |
| Ab1 | VH | DNA | IPN002 | | 57 | 1740 |
| | Signal | | (VH | | | |
| | | | Signal) | | | |
| Ab2 | VH | DNA | PHF1 | | 57 | 1741 |
| | Signal | | (VH Signal) | | | |
| Ab3 | VH | DNA | VH | | 969 | 1742 |
| | Constant | | (constant- | | | |
| | | | 969) | | | |
| Ab4 | VH | DNA | VH | | 972 | 1743 |
| | Constant | | (constant- | | | |
| | | | 972) | | | |
| Ab5 | VH CDR | PRT | 7295-M6 HCDR | WO2015122922; | 10 | 1744 |
| | | | | SEQ ID NO: 12 | | |
| | | | | and 20 | | |
| Ab6 | VH CDR | PRT | 7295-M6 HCDR | WO2015122922; | 16 | 1745 |
| | | | | SEQ ID NO: 13 | | |
| | | | | and 21 | | |
| Ab7 | VH CDR | PRT | 7295-M6 HCDR | WO2015122922; | 4 | 1746 |
| | | | | SEQ ID NO: 14 | | |
| | | | | and 22 | | |
| Ab8 | VH CDR | PRT | 7297-2M1 HCDR | WO2015122922; | 16 | 1747 |
| | | | | SEQ ID NO: 69 | | |
| Ab9 | VH CDR | PRT | 7298-M1 HCDR | WO2015122922; | 11 | 1748 |
| | | | | SEQ ID NO: 28 | | |
| Ab10 | VH CDR | PRT | 7298-M1 HCDR | WO2015122922; | 16 | 1749 |
| | | | | SEQ ID NO: 29 | | |
| Ab11 | VH CDR | PRT | 7298-M1 HCDR | WO2015122922; | 4 | 1750 |
| | | | | SEQ ID NO: 30 | | |
| Ab12 | VH CDR | PRT | 7298-M2 HCDR | WO2015122922; | 10 | 1751 |
| | | | | SEQ ID NO: 36 | | |
| Ab13 | VH CDR | PRT | 7298-M2 HCDR | WO2015122922; | 14 | 1752 |
| | | | | SEQ ID NO: 37 | | |
| Ab14 | VH CDR | PRT | 7298-M2 HCDR | WO2015122922; | 8 | 1753 |
| | | | | SEQ ID NO: 38 | | |
| Ab15 | VH CDR | PRT | 7299-M2 HCDR | WO2015122922; | 10 | 1754 |
| | | | | SEQ ID NO: 44 | | |
| | | | | and 60 | | |
| Ab16 | VH CDR | PRT | 7299-M2 HCDR | WO2015122922; | 16 | 1755 |
| | | | | SEQ ID NO: 45 | | |
| Ab17 | VH CDR | PRT | 7299-M2 HCDR | WO2015122922; | 4 | 1756 |
| | | | | SEQ ID NO: 46 | | |
| | | | | and 62 | | |
| Ab18 | VH CDR | PRT | 7299-M5 HCDR | WO2015122922; | 10 | 1757 |
| | | | | SEQ ID NO: 52 | | |
| | | | | and 68 | | |
| Ab19 | VH CDR | PRT | 7299-M5 HCDR | WO2015122922; | 16 | 1758 |
| | | | | SEQ ID NO: 53 | | |
| Ab20 | VH CDR | PRT | 7299-M5 HCDR | WO2015122922; | 10 | 1759 |
| | | | | SEQ ID NO: 54 | | |
| | | | | and 70 | | |
| Ab21 | VH CDR | PRT | 7299-M9 HCDR | WO2015122922; | 15 | 1760 |
| | | | | SEQ ID NO: 61 | | |
| Ab22 | VH CDR | PRT | C10.2 HCDR1 | WO2017009308; | 13 | 1761 |
| | | | | SEQ ID NO: 12, 20 | | |
| | | | | and 28 | | |
| Ab23 | VH CDR | PRT | C10.2 HCDR2 | WO2017009308; | 16 | 1762 |
| | | | | SEQ ID NO: 13 | | |
| | | | | and 29 | | |
| Ab24 | VH CDR | PRT | C10.2 HCDR3 | WO2017009308; | 6 | 1763 |
| | | | | SEQ ID NO: 14 | | |
| | | | | and 30 | | |
| Ab25 | VH CDR | PRT | C5.2 HCDR2 | WO2017009308; | 16 | 1764 |
| | | | | SEQ ID NO: 21 | | |
| Ab26 | VH CDR | PRT | C5.2 HCDR3 | WO2017009308; | 6 | 1765 |
| | | | | SEQ ID NO: 22 | | |
| Ab27 | VH CDR | PRT | D1.2 HCDR1 | WO2017009308; | 13 | 1766 |
| | | | | SEQ ID NO: 4 | | |
| Ab28 | VH CDR | PRT | D1.2 HCDR2 | WO2017009308; | 16 | 1767 |
| | | | | SEQ ID NO: 5 | | |
| Ab29 | VH CDR | PRT | D1.2 HCDR3 | WO2017009308; | 6 | 1768 |
| | | | | SEQ ID NO: 6 | | |
| Ab30 | VH CDR | PRT | HCDR1 | U.S. Pat. No. 8,980,270; | 5 | 1769 |
| | | | | SEQ ID NO: 4 | | |
| Ab31 | VH CDR | PRT | HCDR1 | U.S. Pat. No. 8,980,270; | 5 | 1770 |
| | | | | SEQ ID NO: 10 | | |
| Ab32 | VH CDR | PRT | HCDR2 | U.S. Pat. No. 8,980,270; | 17 | 1771 |
| | | | | SEQ ID NO: 5 | | |
| Ab33 | VH CDR | PRT | HCDR2 | U.S. Pat. No. 8,980,270; | 17 | 1772 |
| | | | | SEQ ID NO: 11 | | |
| Ab34 | VH CDR | PRT | HCDR2 | WO2015081085; | 32 | 1773 |
| | | | | SEQ ID NO: 27 | | |
| Ab35 | VH CDR | PRT | HCDR3 | U.S. Pat. No. 8,980,270; | 8 | 1774 |
| | | | | SEQ ID NO: 6 | | |
| Ab36 | VH CDR | PRT | HCDR3 | U.S. Pat. No. 8,980,270; | 8 | 1775 |
| | | | | SEQ ID NO: 12 | | |
| Ab37 | VH CDR | PRT | HCDR3 | WO2015081085; | 11 | 1776 |
| | | | | SEQ ID NO: 44 | | |
| Ab38 | VH CDR | PRT | IPN002 HCDR1 | WO2014028777; | 14 | 1777 |
| | | | | SEQ ID NO: 84 | | |
| Ab39 | VH CDR | PRT | IPN002 HCDR2 | WO2014028777; | 32 | 1778 |
| | | | | SEQ ID NO: 85 | | |
| Ab40 | VH CDR | PRT | IPN002 HCDR3 | WO2014028777; | 11 | 1779 |
| | | | | SEQ ID NO: 86 | | |
| Ab41 | VH CDR | PRT | MC1 LCDR1 | WO2016137811; | 13 | 1780 |
| | | | | SEQ ID NO: 6 | | |
| Ab42 | VH CDR | PRT | MC1 LCDR2 | WO2016137811; | 18 | 1781 |
| | | | | SEQ ID NO: 7 | | |
| Ab43 | VH CDR | PRT | MC1 LCDR3 | WO2016137811; | 9 | 1782 |
| | | | | SEQ ID NO: 8 | | |
| Ab44 | VH CDR | PRT | PT1 HCDR1 | U.S. Pat. No. 9,371,376; | 7 | 1783 |
| | | | (Chothia) | SEQ ID NO: 19 | | |
| Ab45 | VH CDR | PRT | PT1 HCDR1 | U.S. Pat. No. 9,371,376; | 5 | 1784 |
| | | | (Kabat) | SEQ ID NO: 7 | | |
| Ab46 | VH CDR | PRT | PT1 HCDR2 | U.S. Pat. No. 9,371,376; | 6 | 1785 |
| | | | (Chothia) | SEQ ID NO: 20 | | |
| Ab47 | VH CDR | PRT | PT1 HCDR2 | U.S. Pat. No. 9,371,376; | 17 | 1786 |
| | | | (Kabat) | SEQ ID NO: 8 | | |
| Ab48 | VH CDR | PRT | PT1 HCDR3 | U.S. Pat. No. 9,371,376; | 9 | 1787 |
| | | | (Chothia) | SEQ ID NO: 21 | | |
| Ab49 | VH CDR | PRT | PT1 HCDR3 | U.S. Pat. No. 9,371,376; | 10 | 1788 |
| | | | (Kabat) | SEQ ID NO: 9 | | |
| Ab50 | VH CDR | PRT | PT3 HCDR1 | U.S. Pat. No. 9,371,376; | 7 | 1789 |
| | | | (Chothia) | SEQ ID NO: 25 | | |
| Ab51 | VH CDR | PRT | PT3 HCDR1 | U.S. Pat. No. 9,371,376; | 5 | 1790 |
| | | | (Kabat) | SEQ ID NO: 13 | | |
| Ab52 | VH CDR | PRT | PT3 HCDR2 | U.S. Pat. No. 9,371,376; | 5 | 1791 |
| | | | (Chothia) | SEQ ID NO: 26 | | |
| Ab53 | VH CDR | PRT | PT3 HCDR2 | U.S. Pat. No. 9,371,376; | 16 | 1792 |
| | | | (Kabat) | SEQ ID NO: 14 | | |
| Ab54 | VH CDR | PRT | PT3 HCDR3 | U.S. Pat. No. 9,371,376; | 9 | 1793 |
| | | | (Chothia) | SEQ ID NO: 27 | | |
| Ab55 | VH CDR | PRT | PT3 HCDR3 | U.S. Pat. No. 9,371,376; | 10 | 1794 |
| | | | (Kabat) | SEQ ID NO: 15 | | |
| Ab56 | VH | PRT | 7295-M6 VH | WO2015122922; | 125 | 1795 |
| | | | | SEQ ID NO: 16 | | |
| | | | | and 24 | | |
| Ab57 | VH | PRT | 7297-2M1 VH | WO2015122922; | 131 | 1796 |
| | | | | SEQ ID NO: 72 | | |
| Ab58 | VH | PRT | 7298-M1 VH | WO2015122922; | 127 | 1797 |
| | | | | SEQ ID NO: 32 | | |
| Ab59 | VH | PRT | 7298-M2 VH | WO2015122922; | 128 | 1798 |
| | | | | SEQ ID NO: 40 | | |
| Ab60 | VH | PRT | 7299-M2 VH | WO2015122922; | 125 | 1799 |
| | | | | SEQ ID NO: 48 | | |
| Ab61 | VH | PRT | 7299-M5 VH | WO2015122922; | 131 | 1800 |
| | | | | SEQ ID NO: 56 | | |
| Ab62 | VH | PRT | 7299-M9 VH | WO2015122922; | 125 | 1801 |
| | | | | SEQ ID NO: 64 | | |
| Ab63 | VH | PRT | C10.2 VH | WO2017009308; | 439 | 1802 |
| | | | | SEQ ID NO: 16 | | |
| Ab64 | VH | PRT | C10.2 VH − 115 | | 115 | 1803 |
| Ab65 | VH | DNA | C10.2 VH | | 345 | 1804 |
| | | | Bioinformatics | | | |
| Ab66 | VH | DNA | C10.2 VH | | 345 | 1805 |
| | | | EMBOSS | | | |
| Ab67 | VH | DNA | C10.2 VH | | 345 | 1806 |
| | | | GeneInfinity | | | |
| Ab68 | VH | DNA | C10.2 VH | | 345 | 1807 |
| | | | GregThatcher | | | |
| Ab69 | VH | DNA | C10.2 VH IDT | | 345 | 1808 |
| Ab70 | VH | DNA | C10.2 VH | | 345 | 1809 |
| | | | InSilico | | | |
| Ab71 | VH | DNA | C10.2 VH MolBio | | 345 | 1810 |
| Ab72 | VH | DNA | C10.2 VH N2P | | 345 | 1811 |
| Ab73 | VH | DNA | C10.2 VH | | 345 | 1812 |
| | | | Snapgene | | | |
| Ab74 | VH | DNA | C10.2 VH Vector | | 345 | 1813 |
| | | | NTI | | | |
| Ab75 | VH | PRT | C5.2 VH | WO2017009308; | 439 | 1814 |
| | | | | SEQ ID NO: 24 | | |
| Ab76 | VH | PRT | C8.3 VH | WO2017009308; | 439 | 1815 |
| | | | | SEQ ID NO: 32 | | |
| Ab77 | VH | PRT | D1.2 VH | WO2017009308; | 451 | 1816 |
| | | | | SEQ ID NO: 8 | | |
| Ab78 | VH | PRT | hC10.2 VH | WO2017009308; | 444 | 1817 |
| | | | | SEQ ID NO: 35 | | |
| Ab79 | VH | DNA | IPN001 VH − 351 | U.S. Pat. No. 8,980,270; | 351 | 1818 |
| | | | | SEQ ID NO: 18 | | |
| Ab80 | VH | PRT | IPN001 VH − 117 | U.S. Pat. No. 8,980,270; | 117 | 1819 |
| | | | | SEQ ID NO: 14 | | |
| Ab81 | VH | DNA | IPN002 VH − 1377 | | 1377 | 1820 |
| Ab82 | VH | DNA | IPN002 VH − 351 | U.S. Pat. No. 8,980,270; | 351 | 1821 |
| | | | | SEQ ID NO: 20 | | |
| Ab83 | VH | PRT | IPN002 VH − 117 | U.S. Pat. No. 8,980,270; | 117 | 1822 |
| | | | | SEQ ID NO: 16 | | |
| Ab84 | VH | PRT | IPN002 VH − 30 | WO2014028777; | 30 | 1823 |
| | | | | SEQ ID NO: 83 | | |
| Ab85 | VH | DNA | IPN002 VH | U.S. Pat. No. 8,980,270; | 351 | 1824 |
| | | | variant 1 | SEQ ID NO: 28 | | |
| Ab86 | VH | PRT | IPN002 VH | U.S. Pat. No. 8,980,270; | 117 | 1825 |
| | | | variant 1 | SEQ ID NO: 36 | | |
| Ab87 | VH | DNA | IPN002 VH | U.S. Pat. No. 8,980,270; | 351 | 1826 |
| | | | variant 2 | SEQ ID NO: 29 | | |
| Ab88 | VH | PRT | IPN002 VH | U.S. Pat. No. 8,980,270; | 117 | 1827 |
| | | | variant 2 | SEQ ID NO: 37 | | |
| Ab89 | VH | DNA | IPN002 VH | U.S. Pat. No. 8,980,270; | 351 | 1828 |
| | | | variant 3 | SEQ ID NO: 30 | | |
| Ab90 | VH | PRT | IPN002 VH | U.S. Pat. No. 8,980,270; | 117 | 1829 |
| | | | variant 3 | SEQ ID NO: 38 | | |
| Ab91 | VH | DNA | IPN002 VH | U.S. Pat. No. 8,980,270; | 351 | 1830 |
| | | | variant 4 | SEQ ID NO: 31 | | |
| Ab92 | VH | PRT | IPN002 VH | U.S. Pat. No. 8,980,270; | 117 | 1831 |
| | | | variant 4 | SEQ ID NO: 39 | | |
| Ab93 | VH | DNA | MC1 VH − 1374 | | 1374 | 1832 |
| Ab94 | VH | DNA | MC1 VH − 1326 | WO2016137811; | 1326 | 1833 |
| | | | | SEQ ID NO: 12 | | |
| Ab95 | VH | PRT | MC1 VH − 458 | | 458 | 1834 |
| Ab96 | VH | PRT | MC1 VH − 442 | WO2016137811; | 442 | 1835 |
| | | | | SEQ ID NO: 2 | | |
| Ab97 | VH | PRT | MC1 VH − 116 | WO2016137811; | 116 | 1836 |
| | | | | SEQ ID NO: 10 | | |
| Ab98 | VH | DNA | PHF1 VH − 1320 | | 1320 | 1837 |
| Ab99 | VH | DNA | PHF1 VH − 1377 | | 1377 | 1838 |
| Ab100 | VH | DNA | PHF1 VH − 351 | | 351 | 1839 |
| Ab101 | VH | DNA | PHF1 VH − 699 | | 699 | 1840 |
| Ab102 | VH | DNA | PHF1 VH − 717 | | 717 | 1841 |
| Ab103 | VH | DNA | PHF1 VH − 744 | | 744 | 1842 |
| Ab104 | VH | DNA | PHF1 VH − 753 | | 753 | 1843 |
| Ab105 | VH | PRT | PHF1 VH − 459 | | 459 | 1844 |
| Ab106 | VH | DNA | PHF1 VH | | 1383 | 1845 |
| Ab107 | VH | DNA | PT1 VH − 357 | U.S. Pat. No. 9,371,376; | 357 | 1846 |
| | | | | SEQ ID NO: 31 | | |
| Ab108 | VH | PRT | PT1 VH − 119 | U.S. Pat. No. 9,371,376; | 119 | 1847 |
| | | | | SEQ ID NO: 35 | | |
| Ab109 | VH | DNA | PT3 VH − 354 | U.S. Pat. No. 9,371,376; | 354 | 1848 |
| | | | | SEQ ID NO: 33 | | |
| Ab110 | VH | PRT | PT3 VH − 118 | U.S. Pat. No. 9,371,376; | 118 | 1849 |
| | | | | SEQ ID NO: 37 | | |
| Ab111 | VH | DNA | PT3 VH | | 354 | 1850 |
| | | | Bioinformatics | | | |
| Ab112 | VH | DNA | PT3 VH | | 354 | 1851 |
| | | | Bioinformatics 2 | | | |
| Ab113 | VH | DNA | PT3 VH EMBOSS | | 354 | 1852 |
| Ab114 | VH | DNA | PT3 VH | | 354 | 1853 |
| | | | Geneinfinity | | | |
| Ab115 | VH | DNA | PT3 VH | | 354 | 1854 |
| | | | Genescript | | | |
| Ab116 | VH | DNA | PT3 VH IDT | | 354 | 1855 |
| Ab117 | VH | DNA | PT3 VH NUS | | 354 | 1856 |
| Ab118 | VH | DNA | PT3 VH NUS2 | | 354 | 1857 |
| Ab119 | VH | DNA | PT3 VH NUS3 | | 354 | 1858 |
| Ab120 | VH | DNA | PT3 VH | | 354 | 1859 |
| | | | Snapgene | | | |
| Ab121 | VH | PRT | VH | WO2015081085; | 30 | 1860 |
| | | | | SEQ ID NO: 25 | | |
| Ab122 | VL | DNA | IPN002 (VL | | 57 | 1861 |
| | Signal | | Signal) | | | |
| Ab123 | VL | DNA | PHF1 (VL Signal) | | 57 | 1862 |
| | Signal | | | | | |
| Ab124 | VL | DNA | PHF1 (VL Signal | | 72 | 1863 |
| | Signal | | 72) | | | |
| Ab125 | VL | DNA | VL (constant) | | 321 | 1864 |
| | Constant | | | | | |
| Ab126 | VL CDR | PRT | 7295-M6 LCDR | WO2015122922; | 16 | 1865 |
| | | | | SEQ ID NO: 9 | | |
| | | | | and 17 | | |
| Ab127 | VL CDR | PRT | 7295-M6 LCDR | WO2015122922; | 9 | 1866 |
| | | | | SEQ ID NO: 11 | | |
| | | | | and 19 | | |
| Ab128 | VL CDR | PRT | 7297-2M1 LCDR | WO2015122922; | 11 | 1867 |
| | | | | SEQ ID NO: 65 | | |
| Ab129 | VL CDR | PRT | 7297-2M1 LCDR | WO2015122922; | 7 | 1868 |
| | | | | SEQ ID NO: 66 | | |
| Ab130 | VL CDR | PRT | 7297-2M1 LCDR | WO2015122922; | 8 | 1869 |
| | | | | SEQ ID NO: 67 | | |
| Ab131 | VL CDR | PRT | 7298-M1 LCDR | WO2015122922; | 15 | 1870 |
| | | | | SEQ ID NO: 25 | | |
| | | | | and 33 | | |
| Ab132 | VL CDR | PRT | 7298-M1 LCDR | WO2015122922; | 7 | 1871 |
| | | | | SEQ ID NO: 26 | | |
| | | | | and 34 | | |
| Ab133 | VL CDR | PRT | 7298-M1 LCDR | WO2015122922; | 9 | 1872 |
| | | | | SEQ ID NO: 27 | | |
| | | | | and 35 | | |
| Ab134 | VL CDR | PRT | 7299-M2 LCDR | WO2015122922; | 16 | 1873 |
| | | | | SEQ ID NO: 41 | | |
| Ab135 | VL CDR | PRT | 7299-M2 LCDR | WO2015122922; | 7 | 1874 |
| | | | | SEQ ID NO: 42 | | |
| Ab136 | VL CDR | PRT | 7299-M2 LCDR | WO2015122922; | 9 | 1875 |
| | | | | SEQ ID NO: 43 | | |
| Ab137 | VL CDR | PRT | 7299-M5 LCDR | WO2015122922; | 16 | 1876 |
| | | | | SEQ ID NO: 49 | | |
| | | | | and 57 | | |
| Ab138 | VL CDR | PRT | 7299-M5 LCDR | WO2015122922; | 7 | 1877 |
| | | | | SEQ ID NO: 50 | | |
| | | | | and 58 | | |
| Ab139 | VL CDR | PRT | 7299-M5 LCDR | WO2015122922; | 9 | 1878 |
| | | | | SEQ ID NO: 51 | | |
| Ab140 | VL CDR | PRT | 7299-M9 LCDR | WO2015122922; | 8 | 1879 |
| | | | | SEQ ID NO: 59 | | |
| Ab141 | VL CDR | PRT | C10.2 LCDR1 | WO2017009308; | 11 | 1880 |
| | | | | SEQ ID NO: 9 | | |
| | | | | and 25 | | |
| Ab142 | VL CDR | PRT | C10.2 LCDR2 | WO2017009308; | 7 | 1881 |
| | | | | SEQ ID NO: 10 | | |
| | | | | and 18 | | |
| Ab143 | VL CDR | PRT | C10.2 LCDR3 | WO2017009308; | 7 | 1882 |
| | | | | SEQ ID NO: 11 | | |
| | | | | and 19 | | |
| Ab144 | VL CDR | PRT | C5.2 LCDR1 | WO2017009308; | 11 | 1883 |
| | | | | SEQ ID NO: 17 | | |
| Ab145 | VL CDR | PRT | C8.3 LCDR2 | WO2017009308; | 7 | 1884 |
| | | | | SEQ ID NO: 26 | | |
| Ab146 | VL CDR | PRT | C8.3 LCDR3 | WO2017009308; | 7 | 1885 |
| | | | | SEQ ID NO: 27 | | |
| Ab147 | VL CDR | PRT | D1.2 LCDR1 | WO2017009308; | 16 | 1886 |
| | | | | SEQ ID NO: 1 | | |
| Ab148 | VL CDR | PRT | D1.2 LCDR2 | WO2017009308; | 7 | 1887 |
| | | | | SEQ ID NO: 2 | | |
| Ab149 | VL CDR | PRT | D1.2 LCDR3 | WO2017009308; | 7 | 1888 |
| | | | | SEQ ID NO: 3 | | |
| Ab150 | VL CDR | PRT | IPN002 LCDR1 | WO2014028777; | 15 | 1889 |
| | | | | SEQ ID NO: 55 | | |
| Ab151 | VL CDR | PRT | IPN002 LCDR2 | WO2014028777; | 32 | 1890 |
| | | | | SEQ ID NO: 56 | | |
| Ab152 | VL CDR | PRT | IPN002 LCDR3 | WO2014028777; | 10 | 1891 |
| | | | | SEQ ID NO: 57 | | |
| Ab153 | VL CDR | PRT | LCDR1 | U.S. Pat. No. 8,980,270; | 16 | 1892 |
| | | | | SEQ ID NO: 1 | | |
| Ab154 | VL CDR | PRT | LCDR1 | U.S. Pat. No. 8,980,270; | 16 | 1893 |
| | | | | SEQ ID NO: 7 | | |
| Ab155 | VL CDR | PRT | LCDR1 | WO2015081085; | 15 | 1894 |
| | | | | SEQ ID NO: 46 | | |
| Ab156 | VL CDR | PRT | LCDR2 | U.S. Pat. No. 8,980,270; | 7 | 1895 |
| | | | | SEQ ID NO: 2 | | |
| Ab157 | VL CDR | PRT | LCDR2 | WO2015081085; | 32 | 1896 |
| | | | | SEQ ID NO: 47 | | |
| Ab158 | VL CDR | PRT | LCDR3 | U.S. Pat. No. 8,980,270; | 9 | 1897 |
| | | | | SEQ ID NO: 3 | | |
| | | | | and 9 | | |
| Ab159 | VL CDR | PRT | MC1 LCDR1 | WO2016137811; | 16 | 1898 |
| | | | | SEQ ID NO: 3 | | |
| Ab160 | VL CDR | PRT | MC1 LCDR2 | WO2016137811; | 8 | 1899 |
| | | | | SEQ ID NO: 4 | | |
| Ab161 | VL CDR | PRT | MC1 LCDR3 | WO2016137811; | 9 | 1900 |
| | | | | SEQ ID NO: 5 | | |
| Ab162 | VL CDR | PRT | PT1 LCDR1 | U.S. Pat. No. 9,371,376; | 12 | 1901 |
| | | | (Chothia) | SEQ ID NO: 22 | | |
| Ab163 | VL CDR | PRT | PT1 LCDR1 | U.S. Pat. No. 9,371,376; | 16 | 1902 |
| | | | (Kabat) | SEQ ID NO: 10 | | |
| Ab164 | VL CDR | PRT | PT1 LCDR2 | U.S. Pat. No. 9,371,376; | 3 | 1903 |
| | | | (Chothia) | SEQ ID NO: 23 | | |
| Ab165 | VL CDR | PRT | PT1 LCDR2 | U.S. Pat. No. 9,371,376; | 7 | 1904 |
| | | | (Kabat) | SEQ ID NO: 11 | | |
| Ab166 | VL CDR | PRT | PT1 LCDR3 | U.S. Pat. No. 9,371,376; | 7 | 1905 |
| | | | (Chothia) | SEQ ID NO: 24 | | |
| Ab167 | VL CDR | PRT | PT1 LCDR3 | U.S. Pat. No. 9,371,376; | 9 | 1906 |
| | | | (Kabat) | SEQ ID NO: 12 | | |
| Ab168 | VL CDR | PRT | PT3 LCDR1 | U.S. Pat. No. 9,371,376; | 7 | 1907 |
| | | | (Chothia) | SEQ ID NO: 28 | | |
| Ab169 | VL CDR | PRT | PT3 LCDR1 | U.S. Pat. No. 9,371,376; | 11 | 1908 |
| | | | (Kabat) | SEQ ID NO: 16 | | |
| Ab170 | VL CDR | PRT | PT3 LCDR2 | U.S. Pat. No. 9,371,376; | 3 | 1909 |
| | | | (Chothia) | SEQ ID NO: 29 | | |
| Ab171 | VL CDR | PRT | PT3 LCDR2 | U.S. Pat. No. 9,371,376; | 7 | 1910 |
| | | | (Kabat) | SEQ ID NO: 17 | | |
| Ab172 | VL CDR | PRT | PT3 LCDR3 | U.S. Pat. No. 9,371,376; | 6 | 1911 |
| | | | (Chothia) | SEQ ID NO: 30 | | |
| Ab173 | VL CDR | PRT | PT3 LCDR3 | U.S. Pat. No. 9,371,376; | 10 | 1912 |
| | | | (Kabat) | SEQ ID NO: 18 | | |
| Ab174 | VL | PRT | 7295-M6 VL | WO2015122922; | 122 | 1913 |
| | | | | SEQ ID NO: 15 | | |
| | | | | and 23 | | |
| Ab175 | VL | PRT | 7297-2M1 VL | WO2015122922; | 116 | 1914 |
| | | | | SEQ ID NO: 71 | | |
| Ab176 | VL | PRT | 7298-M1 VL | WO2015122922; | 121 | 1915 |
| | | | | SEQ ID NO: 31 | | |
| | | | | and 39 | | |
| Ab177 | VL | PRT | 7299-M2 VL | WO2015122922; | 122 | 1916 |
| | | | | SEQ ID NO: 47 | | |
| Ab178 | VL | PRT | 7299-M5 VL | WO2015122922; | 122 | 1917 |
| | | | | SEQ ID NO: 55 | | |
| Ab179 | VL | PRT | 7299-M9 VL | WO2015122922; | 122 | 1918 |
| | | | | SEQ ID NO: 63 | | |
| Ab180 | VL | PRT | C10.2 VL − 107 | | 107 | 1919 |
| Ab181 | VL | PRT | C10.2 VL − 214 | WO2017009308; | 214 | 1920 |
| | | | | SEQ ID NO: 15 | | |
| Ab182 | VL | DNA | C10.2 VL | | 321 | 1921 |
| | | | Bioinformatics | | | |
| Ab183 | VL | DNA | C10.2 VL | | 32 | 1922 |
| | | | EMBOSS | | | |
| Ab184 | VL | DNA | C10.2 VL | | 321 | 1923 |
| | | | GeneInfinity | | | |
| Ab185 | VL | DNA | C10.2 VL | | 321 | 1924 |
| | | | GregThatcher | | | |
| Ab186 | VL | DNA | C10.2 VL IDT | | 321 | 1925 |
| Ab187 | VL | DNA | C10.2 VL | | 321 | 1926 |
| | | | InSilico | | | |
| Ab188 | VL | DNA | C10.2 VL MolBio | | 321 | 1927 |
| Ab189 | VL | DNA | C10.2 VL N2P | | 321 | 1928 |
| Ab190 | VL | DNA | C10.2 VL | | 321 | 1929 |
| | | | Snapgene | | | |
| Ab191 | VL | DNA | C10.2 VL Vector | | 321 | 1930 |
| | | | NTI | | | |
| Ab192 | VL | PRT | C5.2 VL | WO2017009308; | 214 | 1931 |
| | | | | SEQ ID NO: 23 | | |
| Ab193 | VL | PRT | C8.3 VL | WO2017009308; | 214 | 1932 |
| | | | | SEQ ID NO: 31 | | |
| Ab194 | VL | PRT | D1.2 VL | WO2017009308; | 219 | 1933 |
| | | | | SEQ ID NO: 7 | | |
| Ab195 | VL | PRT | D1.2* VL | WO2017009308; | 219 | 1934 |
| | | | | SEQ ID NO: 34 | | |
| Ab196 | VL | PRT | hC10.2 VL | WO2017009308; | 214 | 1935 |
| | | | | SEQ ID NO: 36 | | |
| Ab197 | VL | DNA | IPN001 VL − 336 | U.S. Pat. No. 8,980,270; | 336 | 1936 |
| | | | | SEQ ID NO: 17 | | |
| Ab198 | VL | PRT | IPN001 VL | U.S. Pat. No. 8,980,270; | 112 | 1937 |
| | | | | SEQ ID NO: 13 | | |
| Ab199 | VL | PRT | IPN002 VL | WO2014028777; | 23 | 1938 |
| | | | | SEQ ID NO: 54 | | |
| Ab200 | VL | DNA | IPN002 VL − 336 | U.S. Pat. No. 8,980,270; | 336 | 1939 |
| | | | | SEQ ID NO: 19 | | |
| Ab201 | VL | DNA | IPN002 VL − 714 | | 714 | 1940 |
| Ab202 | VL | PRT | IPN002 VL − 112 | U.S. Pat. No. 8,980,270; | 112 | 1941 |
| | | | | SEQ ID NO: 15 | | |
| Ab203 | VL | DNA | IPN002 VL | U.S. Pat. No. 8,980,270; | 336 | 1942 |
| | | | variant 1 | SEQ ID NO: 32 | | |
| Ab204 | VL | PRT | IPN002 VL | U.S. Pat. No. 8,980,270; | 112 | 1943 |
| | | | variant 1 | SEQ ID NO: 40 | | |
| Ab205 | VL | DNA | IPN002 VL | U.S. Pat. No. 8,980,270; | 336 | 1944 |
| | | | variant 2 | SEQ ID NO: 33 | | |
| Ab206 | VL | PRT | IPN002 VL | U.S. Pat. No. 8,980,270; | 112 | 1945 |
| | | | variant 2 | SEQ ID NO: 41 | | |
| Ab207 | VL | DNA | IPN002 VL | U.S. Pat. No. 8,980,270; | 336 | 1946 |
| | | | variant 3 | SEQ ID NO: 34 | | |
| Ab208 | VL | PRT | IPN002 VL | U.S. Pat. No. 8,980,270; | 112 | 1947 |
| | | | variant 3 | SEQ ID NO: 42 | | |
| Ab209 | VL | DNA | IPN002 VL | U.S. Pat. No. 8,980,270; | 336 | 1948 |
| | | | variant 4 | SEQ ID NO: 35 | | |
| Ab210 | VL | PRT | IPN002 VL | U.S. Pat. No. 8,980,270; | 112 | 1949 |
| | | | variant 4 | SEQ ID NO: 43 | | |
| Ab211 | VL | DNA | MC1 VL − 714 | | 714 | 1950 |
| Ab212 | VL | DNA | MC1 VL − 717 | | 717 | 1951 |
| Ab213 | VL | DNA | MC1 VL − 657 | WO2016137811; | 657 | 1952 |
| | | | | SEQ ID NO: 11 | | |
| Ab214 | VL | PRT | MC1 VL − 238 | | 238 | 1953 |
| Ab215 | VL | PRT | MC1 VL − 219 | WO2016137811; | 219 | 1954 |
| | | | | SEQ ID NO: 1 | | |
| Ab216 | VL | PRT | MC1 VL − 112 | WO2016137811; | 112 | 1955 |
| | | | | SEQ ID NO: 9 | | |
| Ab217 | VL | DNA | PHF1 VL − 339v1 | | 339 | 1956 |
| Ab218 | VL | DNA | PHF1 VL − 339v2 | | 339 | 1957 |
| Ab219 | VL | DNA | PHF1 VL − 396 | | 396 | 1958 |
| Ab220 | VL | DNA | PHF1 VL − 657 | | 657 | 1959 |
| Ab221 | VL | DNA | PHF1 VL − 660 | | 660 | 1960 |
| Ab222 | VL | DNA | PHF1 VL − 678 | | 678 | 1961 |
| Ab223 | VL | DNA | PHF1 VL − 714 | | 714 | 1962 |
| Ab224 | VL | DNA | PHF1 VL − 720 | | 720 | 1963 |
| Ab225 | VL | PRT | PHF1 VL − 239 | | 239 | 1964 |
| Ab226 | VL | DNA | PHF1 VL + (732) | | 732 | 1965 |
| Ab227 | VL | DNA | PHF1 VL + (747) | | 747 | 1966 |
| Ab228 | VL | DNA | PT1 VL − 336 | U.S. Pat. No. 9,371,376; | 336 | 1967 |
| | | | | SEQ ID NO: 32 | | |
| Ab229 | VL | PRT | PT1 VL − 112 | U.S. Pat. No. 9,371,376; | 112 | 1968 |
| | | | | SEQ ID NO: 36 | | |
| Ab230 | VL | DNA | PT3 VL − 321 | U.S. Pat. No. 9,371,376; | 321 | 1969 |
| | | | | SEQ ID NO: 34 | | |
| Ab231 | VL | PRT | PT3 VL − 107 | U.S. Pat. No. 9,371,376; | 107 | 1970 |
| | | | | SEQ ID NO: 38 | | |
| Ab232 | VL | DNA | PT3 VL | | 321 | 1971 |
| | | | Bioinformatics | | | |
| Ab233 | VL | DNA | PT3 VL | | 321 | 1972 |
| | | | Bioinformatics 2 | | | |
| Ab234 | VL | DNA | PT3 VL EMBOSS | | 321 | 1973 |
| Ab235 | VL | DNA | PT3 VL | | 321 | 1974 |
| | | | Geneinfinity | | | |
| Ab236 | VL | DNA | PT3 VL | | 321 | 1975 |
| | | | Genescript | | | |
| Ab237 | VL | DNA | PT3 VL IDT | | 321 | 1976 |
| Ab238 | VL | DNA | PT3 VL NUS | | 321 | 1977 |
| Ab239 | VL | DNA | PT3 VL NUS2 | | 321 | 1978 |
| Ab240 | VL | DNA | PT3 VL NUS3 | | 321 | 1979 |
| Ab241 | VL | DNA | PT3 VL | | 321 | 1980 |
| | | | Snapgene | | | |
| Ab242 | VL | PRT | VL | WO2015081085; | 23 | 1981 |
| | | | | SEQ ID NO: 45 | | |
| Ab243 | Fab | PRT | AT8 Fab1 | Malia, T.J. et al, | 18 | 1982 |
| | | | | “Epitope mapping | | |
| | | | | and structural | | |
| | | | | basis for the | | |
| | | | | recognition | | |
| | | | | of phosphorylated | | |
| | | | | tau by | | |
| | | | | the anti-tau | | |
| | | | | antibody | | |
| | | | | AT8”, | | |
| | | | | Proteins 84 (4), | | |
| | | | | 427-434 (2016), | | |
| | | | | Accession number | | |
| | | | | 5E2V_P | | |
| Ab244 | Fab | PRT | AT8 Fab2 | Malia,T.J. et al, | 18 | 1983 |
| | | | | “Epitope | | |
| | | | | mapping | | |
| | | | | and | | |
| | | | | structural | | |
| | | | | basis for the | | |
| | | | | recognition | | |
| | | | | of phosphorylated | | |
| | | | | tau by | | |
| | | | | the anti-tau | | |
| | | | | antibody | | |
| | | | | AT8”, | | |
| | | | | Proteins 84 (4), | | |
| | | | | 427-434 (2016), | | |
| | | | | Accession | | |
| | | | | number | | |
| | | | | 5E2W_P | | |
| Ab245 | Full | DNA | MC1 Furin 2A- | WO2015035190; | 2168 | 1984 |
| | antibody | | 2168 | SEQ ID NO: 2 | | |
| Ab246 | Full | PRT | MC1 Furin 2A- | WO2015035190; | 718 | 1985 |
| | antibody | | 718 | SEQ ID NO: 4 | | |
| Ab247 | Full | DNA | MC1 optimized | WO2015035190; | 2168 | 1986 |
| | antibody | | seq | SEQ ID NO: 6 | | |
| Ab248 | Full | DNA | PHF1 Furin 2A- | WO2015035190; | 2174 | 1987 |
| | antibody | | 2174 | SEQ ID NO: 1 | | |
| Ab249 | Full | PRT | PHF1 Furin 2A- | WO2015035190; | 720 | 1988 |
| | antibody | | 720 | SEQ ID NO: 3 | | |
| Ab250 | Full | DNA | PHF1 optimized | WO2015035190; | 2174 | 1989 |
| | antibody | | seq | SEQ ID NO: 5 | | |
| Ab251 | VH | DNA | PT3 | | 348 | 2241 |
| Ab252 | VH | DNA | VH (constant- | | 309 | 2242 |
| | Constant | | 309) | | | |
| Ab253 | VH | DNA | VH (constant- | | 291 | 2243 |
| | Constant | | 291) | | | |
| Ab254 | VH | DNA | PHF1 VH − 435 | | 435 | 2169 |
| Ab255 | VH | DNA | PHF1 VH − 408 | | 408 | 2170 |

TABLE 8
Sequences of tau associated disease antibodies

| Ab | | | SEQ |
|---|---|---|---|
| ID | Description | Sequence | ID |
| Ab1 | IPN002 | atgaacttcgggctcagcttgattttccttgtccttgttttaaaagg | 1740 |
| | (VH | tgtccagtgt | |
| | Signal) | | |
| Ab2 | PHF1 (VH | atgggatggagctggatctttctctttctcctgtcaggaactacagg | 1741 |
| | Signal) | tgtcctctct | |
| Ab3 | VH | gccaaaacgacacccccatctgtctatccactggcccctggatctgc | 1742 |
| | (constant- | tgcccaaactaactccatggtgaccctgggatgcctggtcaagggct | |
| | 969) | atttccctgagccagtgacagtgacctggaactctggatccctgtcc | |
| | | agcggtgtgcacaccttcccagctgtcctgcagtctgacctctacac | |
| | | tctgagcagctcagtgactgtcccctccagcacctggcccagcgaga | |
| | | ccgtcacctgcaacgttgcccacccggccagcagcaccaaggtggac | |
| | | aagaaaattgtgcccagggattgtggttgtaagccttgcatatgtac | |
| | | agtcccagaagtatcatctgtcttcatcttccccccaaagcccaagg | |
| | | atgtgctcaccattactctgactcctaaggtcacgtgtgttgtggta | |
| | | gacatcagcaaggatgatcccgaggtccagttcagctggtttgtaga | |
| | | tgatgtggaggtgcacacagctcagacgcaaccccgggaggagcagt | |
| | | tcaacagcactttccgctcagtcagtgaacttcccatcatgcaccag | |
| | | gactggctcaatggcaaggagttcaaatgcagggtcaacagtgcagc | |
| | | tttccctgcccccatcgagaaaaccatctccaaaaccaaaggcagac | |
| | | cgaaggctccacaggtgtacaccattccacctcccaaggagcagatg | |
| | | gccaaggataaagtcagtctgacctgcatgataacagacttcttccc | |
| | | tgaagacattactgtggagtggcagtggaatgggcagccagcggaga | |
| | | actacaagaacactcagcccatcatggacacagatggctcttacttc | |
| | | gtctacagcaagctcaatgtgcagaagagcaactgggaggcaggaaa | |
| | | tactttcacctgctctgtgttacatgagggcctgcacaaccaccata | |
| | | ctgagaagagcctctcccactctcctggt | |
| Ab4 | VH | gccaaaacgacacccccatctgtctatccactggcccctggatctgc | 1743 |
| | (constant- | tgcccaaactaactccatggtgaccctgggatgcctggtcaagggct | |
| | 972) | atttccctgagccagtgacagtgacctggaactctggatccctgtcc | |
| | | agcggtgtgcacaccttcccagctgtcctgcagtctgacctctacac | |
| | | tctgagcagctcagtgactgtcccctccagcacctggcccagcgaga | |
| | | ccgtcacctgcaacgttgcccacccggccagcagcaccaaggtggac | |
| | | aagaaaattgtgcccagggattgtggttgtaagccttgcatatgtac | |
| | | agtcccagaagtatcatctgtcttcatcttccccccaaagcccaagg | |
| | | atgtgctcaccattactctgactcctaaggtcacgtgtgttgtggta | |
| | | gacatcagcaaggatgatcccgaggtccagttcagctggtttgtaga | |
| | | tgatgtggaggtgcacacagctcagacgcaaccccgggaggagcagt | |
| | | tcaacagcactttccgctcagtcagtgaacttcccatcatgcaccag | |
| | | gactggctcaatggcaaggagttcaaatgcagggtcaacagtgcagc | |
| | | tttccctgcccccatcgagaaaaccatctccaaaaccaaaggcagac | |
| | | cgaaggctccacaggtgtacaccattccacctcccaaggagcagatg | |
| | | gccaaggataaagtcagtctgacctgcatgataacagacttcttccc | |
| | | tgaagacattactgtggagtggcagtggaatgggcagccagcggaga | |
| | | actacaagaacactcagcccatcatggacacagatggctcttacttc | |
| | | gtctacagcaagctcaatgtgcagaagagcaactgggaggcaggaaa | |
| | | tactttcacctgctctgtgttacatgagggcctgcacaaccaccata | |
| | | ctgagaagagcctctcccactctcctggtaag | |
| Ab5 | 7295-M6 | GFNIKDYYIH | 1744 |
| | HCDR | | |
| Ab6 | 7295-M6 | WIDPENGDTEYAPKFQ | 1745 |
| | HCDR | | |
| Ab7 | 7295-M6 | APGY | 1746 |
| | HCDR | | |
| Ab8 | 7297-2M1 | NIDPSDSETHYNQKFK | 1747 |
| | HCDR | | |
| Ab9 | 7298-M1 | SGFTFTDYYMS | 1748 |
| | HCDR | | |
| Ab10 | 7298-M1 | NRNKTKGYTTEYSASV | 1749 |
| | HCDR | | |
| Ab11 | 7298-M1 | GMDY | 1750 |
| | HCDR | | |
| Ab12 | 7298-M2 | GFTFSTYPMS | 1751 |
| | HCDR | | |
| Ab13 | 7298-M2 | SISNGGSTYYPDTV | 1752 |
| | HCDR | | |
| Ab14 | 7298-M2 | GRDYHFDF | 1753 |
| | HCDR | | |
| Ab15 | 7299-M2 | GYTFTNYWIN | 1754 |
| | HCDR | | |
| Ab16 | 7299-M2 | IYPGSTRANYNEKFKS | 1755 |
| | HCDR | | |
| Ab17 | 7299-M2 | THSI | 1756 |
| | HCDR | | |
| Ab18 | 7299-M5 | GYTFISNWMH | 1757 |
| | HCDR | | |
| Ab19 | 7299-M5 | IDPSDSETHYNQKFKD | 1758 |
| | HCDR | | |
| Ab20 | 7299-M5 | RDRDGYYFDY | 1759 |
| | HCDR | | |
| Ab21 | 7299-M9 | IYPGSTRANYNEKFK | 1760 |
| | HCDR | | |
| Ab22 | C10.2 | KASGYTFTDRTIH | 1761 |
| | HCDR1 | | |
| Ab23 | C10.2 | YIYPGDGSTKYNENFK | 1762 |
| | HCDR2 | | |
| Ab24 | C10.2 | RGAMDY | 1763 |
| | HCDR3 | | |
| Ab25 | C5.2 | YIYPGDDSTKYNDNFK | 1764 |
| | HCDR2 | | |
| Ab26 | C5.2 | RGTMDY | 1765 |
| | HCDR3 | | |
| Ab27 | D1.2 | KASGNTFTDYEIH | 1766 |
| | HCDR1 | | |
| Ab28 | D1.2 | AIDPETGNTAYNQKFK | 1767 |
| | HCDR2 | | |
| Ab29 | D1.2 | SRGFDY | 1768 |
| | HCDR3 | | |
| Ab30 | HCDR1 | SYGMS | 1769 |
| Ab31 | HCDR1 | KYGMS | 1770 |
| Ab32 | HCDR2 | TISSSGSRTYFPDSVKG | 1771 |
| Ab33 | HCDR2 | TISSSGSRTYYPDSVKG | 1772 |
| Ab34 | HCDR2 | RFTISRDNAKNTLYLQMSSSKSEDTAMYYCSI | 1773 |
| Ab35 | HCDR3 | TWDGAMDY | 1774 |
| Ab36 | HCDR3 | SWDGAMDY | 1775 |
| Ab37 | HCDR3 | WGQGTSVTVSS | 1776 |
| Ab38 | IPN002 | WVRQAPGKGLEWVA | 1777 |
| | HCDR1 | | |
| Ab39 | IPN002 | RFTISRDNAKNTLYLQMXSXXXEDTAMYYCXI | 1778 |
| | HCDR2 | | |
| Ab40 | IPN002 | WGQGTXVTVSS | 1779 |
| | HCDR3 | | |
| Ab41 | MC1 | KGSGYTFSNYWIE | 1780 |
| | LCDR1 | | |
| Ab42 | MC1 | EILPGSDSIKYEKNFKG | 1781 |
| | LCDR2 | | |
| Ab43 | MC1 | ARRGNYVDD | 1782 |
| | LCDR3 | | |
| Ab44 | PT1 | GYTFSSS | 1783 |
| | HCDR1 | | |
| | (Chothia) | | |
| Ab45 | PT1 | SSWMG | 1784 |
| | HCDR1 | | |
| | (Kabat) | | |
| Ab46 | PT1 | LPGSGG | 1785 |
| | HCDR2 | | |
| | (Chothia) | | |
| Ab47 | PT1 | DILPGSGGTNYNERFKG | 1786 |
| | HCDR2 | | |
| | (Kabat) | | |
| Ab48 | PT1 | SYYDYDRFA | 1787 |
| | HCDR3 | | |
| | (Chothia) | | |
| Ab49 | PT1 | SYYDYDRFAN | 1788 |
| | HCDR3 | | |
| | (Kabat) | | |
| Ab50 | PT3 | GFTFSSY | 1789 |
| | HCDR1 | | |
| | (Chothia) | | |
| Ab51 | PT3 | SYAMS | 1790 |
| | HCDR1 | | |
| | (Kabat) | | |
| Ab52 | PT3 | SKGGN | 1791 |
| | HCDR2 | | |
| | (Chothia) | | |
| Ab53 | PT3 | SISKGGNTYYPNSVKG | 1792 |
| | HCDR2 | | |
| | (Kabat) | | |
| Ab54 | PT3 | GWGDYGWFA | 1793 |
| | HCDR3 | | |
| | (Chothia) | | |
| Ab55 | PT3 | GWGDYGWFAY | 1794 |
| | HCDR3 | | |
| | (Kabat) | | |
| Ab56 | 7295-M6 | LPEVQLEESGAELVRSGASVTLSCTASGFNIKDYYIHWVKQRPEQGL | 1795 |
| | VH | EWIGWIDPENGDTEYAPKFQGKATMTADTSSNTAYLQLSSLTSEDTA | |
| | | VYYCNGAPGYWGPGTTLTVSSAKTIPPSVYS | |
| Ab57 | 7297-2M1 | LPEVQLEQSGAELVKPGASVKLSCKASGYTFISNWMHWVKQRPGQGL | 1796 |
| | VH | EWIGNIDPSDSETHYNQKFKDKATLTVDKSSSTAYMQLSSLTSEDSA | |
| | | VYYCARRDRDGYYFDYWGQGTTLTVSSAKTTPPSVYS | |
| Ab58 | 7298-M1 | LPEVQLEESGGGLVQPGGSLSLSCAASGFTFTDYYMSWVRQPPGKAL | 1797 |
| | VH | EWVALNRNKTKGYTTEYSASVKGRFTISRDNSQSILYLQMNALRAED | |
| | | SATYYCARGMDYWGQGTSVTVSSAKTTPPSVYS | |
| Ab59 | 7298-M2 | LPEVQLEESGGGLVKPGGSLKLSCAASGFTFSTYPMSWVRQTPEKRL | 1798 |
| | VH | EWVASISNGGSTYYPDTVKGRFTISRDNARNILYLQMSSLRSEDTAM | |
| | | YYCARGRDYHFDFWGQGTTLTVSSAKTIPPSVYS | |
| Ab60 | 7299-M2 | LPQVQLEESGAELVKPGASVKLSCKASGYTFTNYWINWVKQRPGQGL | 1799 |
| | VH | EWIGNIYPGSTRANYNEKFKSKATLTVDISSSTAYMQVSSLISDDSA | |
| | | VYYCTRTHSIWGQGTQVTVSAAKTTPPSVYS | |
| Ab61 | 7299-M5 | LPEVKLEESGAELVKPGASVKLSCKASGYTFISNWMHWVKQRPGQGL | 1800 |
| | VH | EWIGNIDPSDSETHYNQKFKDKATLTVDKSSSTAYMQLSSLISEDSA | |
| | | VYYCARRDRDGYYFDYWGQGTTLTVSSAKTTPPSVYS | |
| Ab62 | 7299-M9 | LPEVKLEQSGAELVKPGASVKLSCKASGYTFTNYWINWVKQRPGQGL | 1801 |
| | VH | EWIGNIYPGSTRANYNEKFKSKATLTVDISSSTAYMQVSSLTSDDSA | |
| | | VYYCTRTHSIWGQGTQVTVSAAKTIPPSVYS | |
| Ab63 | C10.2 VH | QVQLQQSDAELVKPGASVKISCKASGYTFTDRTIHWVKQRPEQGLEW | 1802 |
| | | IGYIYPGDGSTKYNENFKGKATLIADKSSSTAYMQLNSLTSEDSAVY | |
| | | FCARRGAMDYWGQGTSVTVSSAKTTPPSVYPLAPGSAAQTNSMVTLG | |
| | | CLVKGYFPEPVTVTWNSGSLSSGVHTFPAVLQSDLYTLSSSVTVPSS | |
| | | TWPSETVTCNVAHPASSTKVDKKIVPRDCGCKPCICTVPEVSSVFIF | |
| | | PPKPKDVLTITLTPKVTCVVVDISKDDPEVQFSWFVDDVEVHTAQTQ | |
| | | PREEQFNSIFRSVSELPIMHQDWLNGKEFKCRVNSAAFPAPIEKTIS | |
| | | KTKGRPKAPQVYTIPPPKEQMAKDKVSLTCMITDFFPEDITVEWQWN | |
| | | GQPAENYKNTQPIMDTDGSYFVYSKLNVQKSNWEAGNTFTCSVLHEG | |
| | | LHNHHTEKSLSHSPGK | |
| Ab64 | C10.2 VH- | QVQLQQSDAELVKPGASVKISCKASGYTFTDRTIHWVKQRPEQGLEW | 1803 |
| | 115 | IGYIYPGDGSTKYNENFKGKATLTADKSSSTAYMQLNSLTSEDSAVY | |
| | | FCARRGAMDYWGQGTSVTVSS | |
| Ab65 | C10.2 VH | caggtgcagctgcagcagagcgacgccgagctggtgaagcccggcgc | 1804 |
| | Bioinformatics | cagcgtgaagatcagctgcaaggccagcggctacaccttcaccgaca | |
| | | ggaccatccactgggtgaagcagaggcccgagcagggcctggagtgg | |
| | | atcggctacatctaccccggcgacggcagcaccaagtacaacgagaa | |
| | | cttcaagggcaaggccaccctgaccgccgacaagagcagcagcaccg | |
| | | cctacatgcagctgaacagcctgaccagcgaggacagcgccgtgtac | |
| | | ttctgcgccaggaggggcgcgatggactactggggccagggcaccag | |
| | | cgtgaccgtgagcagc | |
| Ab66 | C10.2 VH | caggtgcagctgcagcagagcgacgccgagctggtgaagcccggcgc | 1805 |
| | EMBOSS | cagcgtgaagatcagctgcaaggccagcggctacaccttcaccgacc | |
| | | ggaccatccactgggtgaagcagcggcccgagcagggcctggagtgg | |
| | | atcggctacatctaccccggcgacggcagcaccaagtacaacgagaa | |
| | | cttcaagggcaaggccaccctgaccgccgacaagagcagcagcaccg | |
| | | cctacatgcagctgaacagcctgaccagcgaggacagcgccgtgtac | |
| | | ttctgcgcccggcggggcgctatggactactggggccagggcaccag | |
| | | cgtgaccgtgagcagc | |
| Ab67 | C10.2 VH | caggtgcagctgcagcagagcgacgccgagctggtgaagcccggcgc | 1806 |
| | GeneInfinity | cagcgtgaagatcagctgcaaggccagcggctacaccttcaccgacc | |
| | | gaaccatccactgggtgaagcagcgacccgagcagggcctggagtgg | |
| | | atcggctacatctaccccggcgacggcagcaccaagtacaacgagaa | |
| | | cttcaagggcaaggccaccctgaccgccgacaagagcagcagcaccg | |
| | | cctacatgcagctgaacagcctgaccagcgaggacagcgccgtgtac | |
| | | ttctgcgcccgacgaggcgctatggactactggggccagggcaccag | |
| | | cgtgaccgtgagcagc | |
| Ab68 | C10.2 VH | caggtgcagctgcagcagagcgatgccgagctggtgaaacctggggc | 1807 |
| | GregThatcher | cagcgtcaagatcagctgcaaggcctccgggtacaccttcaccgacc | |
| | | gcaccatccactgggtgaagcagcggcccgagcaggggctggagtgg | |
| | | atcggctacatctaccccggggacggcagcaccaagtacaacgagaa | |
| | | cttcaagggcaaggccaccctgaccgccgacaagtccagcagcacgg | |
| | | cctacatgcagctcaacagcctcaccagcgaggacagcgccgtgtac | |
| | | ttctgcgcccggcggggcgcaatggactactggggccagggcacctc | |
| | | cgtgaccgtgtcctcc | |
| Ab69 | C10.2 VH | caggtgcagctgcagcagagcgatgccgagctggtgaaacccggggc | 1808 |
| | IDT | ctccgtcaagatcagctgcaaggccagcgggtacaccttcaccgacc | |
| | | gcaccatccactgggtgaagcagcggcccgagcagggcctggagtgg | |
| | | atcggctacatctaccccggggacggcagcaccaagtacaacgagaa | |
| | | cttcaagggcaaggccaccctgaccgccgacaagtccagcagcacag | |
| | | cctacatgcagctcaacagcctcacctctgaggacagcgccgtgtac | |
| | | ttctgcgcccggcggggcgcgatggactactggggccaggggaccag | |
| | | cgtgaccgtgtcctcc | |
| Ab70 | C10.2 VH | caggtgcagctgcagcagagcgacgccgagctggtgaaacctggggc | 1809 |
| | InSilico | cagcgtcaagatcagctgcaaggcctccggctacaccttcaccgacc | |
| | | gcaccatccactgggtgaagcagcggcccgagcaggggctggagtgg | |
| | | atcgggtacatctaccccggggacggctccaccaagtacaacgagaa | |
| | | cttcaagggcaaagccaccctgacggccgacaagtccagcagcaccg | |
| | | cctacatgcagctgaacagcctgaccagcgaggacagcgccgtgtac | |
| | | ttctgcgcccggggggggctatggactactggggccagggcacctc | |
| | | cgtgaccgtgtcctcc | |
| Ab71 | C10.2 VH | caggtgcagctgcagcagtccgacgccgagctggtgaagcccggcgc | 1810 |
| | MolBio | ctccgtgaagatctcctgcaaggcctccggctacaccttcaccgacc | |
| | | ggaccatccactgggtgaagcagcggcccgagcagggcctggagtgg | |
| | | atcggctacatctaccccggcgacggctccaccaagtacaacgagaa | |
| | | cttcaagggcaaggccaccctgaccgccgacaagtcctcctccaccg | |
| | | cctacatgcagctgaactccctgacctccgaggactccgccgtgtac | |
| | | ttctgcgcccggcggggcgctatggactactggggccagggcacctc | |
| | | cgtgaccgtgtcctcc | |
| Ab72 | C10.2 VH | caggtgcagctgcagcagtccgatgccgagctggtgaaaccgggggc | 1811 |
| | N2P | cagcgtcaagatctcatgcaaagcttccggctacaccttcaccgaca | |
| | | gaaccatccactgggtgaagcagcggcccgagcaggggctggagtgg | |
| | | atcgggtacatctaccccggggacggcagcaccaagtacaacgagaa | |
| | | cttcaagggcaaggccaccctgacagccgacaagtccagctccaccg | |
| | | cctacatgcagctcaacagcctgacctccgaggacagcgccgtgtac | |
| | | ttctgcgcccggcggggcgcaatggactactggggccagggcaccag | |
| | | cgtgaccgtgagcagc | |
| Ab73 | C10.2 VH | caggtgcagctgcagcagagcgacgccgagctggtgaagcctggcgc | 1812 |
| | Snapgene | cagcgtgaagatcagctgcaaggccagcggctacaccttcaccgacc | |
| | | gtaccatccactgggtgaagcagcgacctgagcagggcctggagtgg | |
| | | atcggctacatctaccctggcgacggcagcaccaagtacaacgagaa | |
| | | cttcaagggcaaggccaccctgaccgccgacaagagcagcagcaccg | |
| | | cctacatgcagctgaacagcctgaccagcgaggacagcgccgtgtac | |
| | | ttctgcgcccgtcgaggcgctatggactactggggccagggcaccag | |
| | | cgtgaccgtgagcagc | |
| Ab74 | C10.2 VH | caggtgcagctgcagcagagcgacgccgagctggtgaagcctggcgc | 1813 |
| | Vector NTI | cagcgtgaagatcagctgcaaggccagcggctacaccttcaccgacc | |
| | | gtaccatccactgggtgaagcagcgacctgagcagggcctggagtgg | |
| | | atcggctacatctaccccggcgacggcagcaccaagtacaacgagaa | |
| | | cttcaagggcaaggccaccctgaccgccgacaagagcagcagcaccg | |
| | | cctacatgcagctgaacagcctgaccagcgaggacagcgccgtgtac | |
| | | ttctgcgcccggcggggcgctatggactactggggccagggcaccag | |
| | | cgtgaccgtgagcagc | |
| Ab75 | C5.2 VH | QVQLQQSDAELVKPGASVKISCKASGYTFTDRTIHWVKQRPEQGLEW | 1814 |
| | | IGYIYPGDDSTKYNDMFKAKATLTADKSSNTAYMQLNSLTSDDSAVY | |
| | | FCARRGTMDYWGQGISVTVSSAKTTPPSVYPLAPGSAAQTNSMVTLG | |
| | | CLVKGYFPEPVTVTWNSGSLSSGVHTFPAVLQSDLYTLSSSVTVPSS | |
| | | TWPSETVTCNVAHPASSTKVDKKIVPRDCGCKPCICTVPEVSSVFIF | |
| | | PPKPKDVLTITLTPKVTCVVVDISKDDPEVQFSWFVDDVEVHTAQTQ | |
| | | PREEQFNSTFRSVSELPIMHQDWLNGKEFKCRVNSAAFPAPIEKTIS | |
| | | KTKGRPKAPQVYTIPPPKEQMAKDKVSLTCMITDFFPEDITVEWQWN | |
| | | GQPAENYKNTQPIMDTDGSYFVYSKLNVQKSNWEAGNTFTCSVLHEG | |
| | | LHNHHTEKSLSHSPGK | |
| Ab76 | C8.3 VH | QVQLQQSDAELVNPGASVKISCKASGYTFTDRTIHWVKQRPEQGLEW | 1815 |
| | | IGYIYPGDGSTKYNENFKGKATLTADKSSSTAYMQLNSLASEDSAVY | |
| | | FCARRGAMDYWGQGTSVTVSSAKTTPPSVYPLAPGSAAQTNSMVTLG | |
| | | CLVKGYFPEPVTVTWNSGSLSSGVHTFPAVLQSDLYTLSSSVTVPSS | |
| | | TWPSETVTCNVAHPASSTKVDKKIVPRDCGCKPCICTVPEVSSVFIF | |
| | | PPKPKDVLIITLTPKVTCVVVDISKDDPEVQFSWFVDDVEVHTAQTQ | |
| | | PREEQFNSTERSVSELPIMHQDWLNGKEFKCRVNSAAFPAPIEKTIS | |
| | | KTKGRPKAPQVYTIPPPKEQMAKDKVSLTCMITDFFPEDITVEWQWN | |
| | | GQPAENYKNTQPIMDTDGSYFVYSKLNVQKSNWEAGNTFTCSVLHEG | |
| | | LHNHHTEKSLSHSPGK | |
| Ab77 | D1.2 VH | QVQLQQSGAELVRPGASVILSCKASGNIFIDYEIHWVKQTPVHGLEW | 1816 |
| | | IGAIDPETGNTAYNQKFKGKARLTADKSSSTAYMELRSLTSEDSAVY | |
| | | YCTRSRGFDYWGQGTTLTVSSAKTTPPSVYPLAPGCGDTTGSSVTLG | |
| | | CLVKGYFPESVTVTWNSGSLSSSVHTFPALLQSGLYTMSSSVTVPSS | |
| | | TWPSQTVTCSVAHPASSTTVDKKLEPSGPISTINPCPPCKECHKCPA | |
| | | PNLEGGPSVFIFPPNIKDVLMISLTPKVTCVVVDVSEDDPDVRISWF | |
| | | VNNVEVHTAQTQTHREDYNSTIRVVSALPIQHQDWMSGKEFKCKVNN | |
| | | KDLPSPIERTISKIKGLVRAPQVYILPPPAEQLSRKDVSLTCLVVGF | |
| | | NPGDISVEWTSNGHTEENYKDTAPVLDSDGSYFIYSKLDIKTSKWEK | |
| | | TDSFSCNVRHEGLKNYYLKKTISRSPGK | |
| Ab78 | hC10.2 VH | QVQLVQSGAEVVKPGASVKISCKASGYTFTDRTIHWVRQAPGQGLEW | 1817 |
| | | IGYIYPGDGSTKYSQKFQGRATLTADTSASTAYMELSSLRSEDTAVY | |
| | | YCARRGAMDYWGQGTSVTVSSASTKGPSVFPLAPSSKSTSGGTAALG | |
| | | CLVKDYFPEPVTVSWNSGALISGVHTFPAVLQSSGLYSLSSVVTVPS | |
| | | SSLGTQTYICNVNHKPSNTKVDKRVEPKSCDKTHTCPPCPAPELLGG | |
| | | PSVFLFPPKPKDTLMISRTPEVTCVVVDVSHEDPEVKFNWYVDGVEV | |
| | | HNAKTKPREEQYNSTYRVVSVLTVLHQDWLNGKEYKCKVSNKALPAP | |
| | | IEKTISKAKGQPREPQVYTLPPSREEMTKNQVSLTCLVKGFYPSDIA | |
| | | VEWESNGQPENNYKTTPPVLDSDGSFFLYSKLTVDKSRWQQGNVFSC | |
| | | SVMHEALHNHYTQKSLSLSPG | |
| Ab79 | IPN001 | gaggtgcagttggtggagtctggggaagacttagtgaagcctggagg | 1818 |
| | VH-351 | gtccctgaaactctcctgtgtcgcttctggattcgctttcagtagct | |
| | | atggcatgtcttgggttcgccagactccagacatgaggctggagtgg | |
| | | gtcgcaacaattagtagcagtggtagtcgcacctactttccagacag | |
| | | tgtgaaggggcgactcaccatctccagagacaatgacaagaacatcc | |
| | | tatacctacaaatgagcagtctgaggtctgaggacacagccatgtac | |
| | | tattgtacgattacctgggacggtgctatggactactggggtcgtgg | |
| | | aatatcagtcaccgtctcctca | |
| Ab80 | IPN001 | EVQLVESGEDLVKPGGSLKLSCVASGFAFSSYGMSWVRQTPDMRLEW | 1819 |
| | VH-117 | VATISSSGSRTYFPDSVKGRLTISRDNDKNILYLQMSSLRSEDTAMY | |
| | | YCTITWDGAMDYWGRGISVTVSS | |
| Ab81 | IPN002 | atgaacttcgggctcagcttgattttccttgtccttgttttaaaagg | 1820 |
| | VH-1377 | tgtccagtgtgaggttcatctggtggagtctgggggagccttagtga | |
| | | agcctggagggtccctgaaactctcctgtgcagcctctggattcagt | |
| | | ttcagtaaatatggcatgtcttgggttcgccagactccagacaagag | |
| | | gctggagtgggtcgcaaccattagtagtagtgggagtcgcacctact | |
| | | atccagacagtgtgaagggccaattcaccatctccagagacaatgcc | |
| | | aagaacaccctgtacctgcaaatgagcagtctgaagtctgaggacac | |
| | | agccatgtattactgttcaattagctgggacggtgctatggactact | |
| | | ggggtcaagggacctcagtcaccgtctcctcagccaaaacgacaccc | |
| | | ccatctgtctatccactggcccctggatctgctgcccaaactaactc | |
| | | catggtgaccctgggatgcctggtcaagggctatttccctgagccag | |
| | | tgacagtgacctggaactctggatccctgtccagcggtgtgcacacc | |
| | | ttcccagctgtcctgcagtctgacctctacactctgagcagctcagt | |
| | | gactgtcccctccagcacctggcccagcgagaccgtcacctgcaacg | |
| | | ttgcccacccggccagcagcaccaaggtggacaagaaaattgtgccc | |
| | | agggattgtggttgtaagccttgcatatgtacagtcccagaagtatc | |
| | | atctgtcttcatcttccccccaaagcccaaggatgtgctcaccatta | |
| | | ctctgactcctaaggtcacgtgtgttgtggtagacatcagcaaggat | |
| | | gatcccgaggtccagttcagctggtttgtagatgatgtggaggtgca | |
| | | cacagctcagacgcaaccccgggaggagcagttcaacagcactttcc | |
| | | gctcagtcagtgaacttcccatcatgcaccaggactggctcaatggc | |
| | | aaggagttcaaatgcagggtcaacagtgcagctttccctgcccccat | |
| | | cgagaaaaccatctccaaaaccaaaggcagaccgaaggctccacagg | |
| | | tgtacaccattccacctcccaaggagcagatggccaaggataaagtc | |
| | | agtctgacctgcatgataacagacttcttccctgaagacattactgt | |
| | | ggagtggcagtggaatgggcagccagcggagaactacaagaacactc | |
| | | agcccatcatggacacagatggctcttacttcgtctacagcaagctc | |
| | | aatgtgcagaagagcaactgggaggcaggaaatactttcacctgctc | |
| | | tgtgttacatgagggcctgcacaaccaccatactgagaagagcctct | |
| | | cccactctcctggt | |
| Ab82 | IPN002 | gaggttcatctggtggagtctgggggagccttagtgaagcctggagg | 1821 |
| | VH-351 | gtccctgaaactctcctgtgcagcctctggattcagtttcagtaaat | |
| | | atggcatgtcttgggttcgccagactccagacaagaggctggagtgg | |
| | | gtcgcaaccattagtagtagtgggagtcgcacctactatccagacag | |
| | | tgtgaagggccaattcaccatctccagagacaatgccaagaacaccc | |
| | | tgtacctgcaaatgagcagtctgaagtctgaggacacagccatgtat | |
| | | tactgttcaattagctgggacggtgctatggactactggggtcaagg | |
| | | gacctcagtcaccgtctcctca | |
| Ab83 | IPN002 | EVHLVESGGALVKPGGSLKLSCAASGFSFSKYGMSWVRQTPDKRLEW | 1822 |
| | VH-117 | VATISSSGSRTYYPDSVKGQFTISRDNAKNTLYLQMSSLKSEDTAMY | |
| | | YCSISWDGAMDYWGQGTSVTVSS | |
| Ab84 | IPN002 | EVXLVESGGALVKPGGSLRLSCAASGFSFS | 1823 |
| | VH-30 | | |
| Ab85 | IPN002 | gaggttcatctggtggagtctgggggagccttagtgaagcctggagg | 1824 |
| | VH variant | gtccctgagactctcctgtgcagcctctggattcagtttcagtaaat | |
| | 1 | atggcatgtcttgggttcgccaggccccaggcaagggcctggagtgg | |
| | | gtcgcaaccattagtagtagtgggagtcgcacctactatccagacag | |
| | | tgtgaagggcagattcaccatctccagagacaatgccaagaacaccc | |
| | | tgtacctgcaaatgagcagtctgaagtctgaggacacagccatgtat | |
| | | tactgttcaattagctgggacggtgctatggactactggggtcaagg | |
| | | gacctcagtcaccgtctcctca | |
| Ab86 | IPN002 | EVHLVESGGALVKPGGSLRLSCAASGFSFSKYGMSWVRQAPGKGLEW | 1825 |
| | VH variant | VATISSSGSRTYYPDSVKGRFTISRDNAKNTLYLQMSSLKSEDTAMY | |
| | 1 | YCSISWDGAMDYWGQGTSVTVSS | |
| Ab87 | IPN002 | gaggttcatctggtggagtctgggggagccttagtgaagcctggagg | 1826 |
| | VH variant | gtccctgagactctcctgtgcagcctctggattcagtttcagtaaat | |
| | 2 | atggcatgtcttgggttcgccaggccccaggcaagggcctggagtgg | |
| | | gtcgcaaccattagtagtagtgggagtcgcacctactatccagacag | |
| | | tgtgaagggcagattcaccatctccagagacaatgccaagaacaccc | |
| | | tgtacctgcaaatgaacagtctgagagccgaggacacagccatgtat | |
| | | tactgttcaattagctgggacggtgctatggactactggggtcaagg | |
| | | gaccaccgtcaccgtctcctca | |
| Ab88 | IPN002 | EVHLVESGGALVKPGGSLRLSCAASGFSFSKYGMSWVRQAPGKGLEW | 1827 |
| | VH variant | VATISSSGSRTYYPDSVKGRFTISRDNAKNTLYLQMNSLRAEDTAMY | |
| | 2 | YCSISWDGAMDYWGQGTTVTVSS | |
| Ab89 | IPN002 | gaggttcagctggtggagtctgggggagccttagtgaagcctggagg | 1828 |
| | VH variant | gtccctgagactctcctgtgcagcctctggattcagtttcagtaaat | |
| | 3 | atggcatgtcttgggttcgccaggccccaggcaagggcctggagtgg | |
| | | gtcgcaaccattagtagtagtgggagtcgcacctactatccagacag | |
| | | tgtgaagggcagattcaccatctccagagacaatgccaagaacaccc | |
| | | tgtacctgcaaatgaacagtctgagagccgaggacacagccatgtat | |
| | | tactgttcaattagctgggacggtgctatggactactggggtcaagg | |
| | | gaccaccgtcaccgtctcctca | |
| Ab90 | IPN002 | EVQLVESGGALVKPGGSLRLSCAASGFSFSKYGMSWVRQAPGKGLEW | 1829 |
| | VH variant | VATISSSGSRTYYPDSVKGRFTISRDNAKNTLYLQMNSLRAEDTAMY | |
| | 3 | YCSISWDGAMDYWGQGTTVTVSS | |
| Ab91 | IPN002 | gaggttcagctggtggagtctgggggagccttagtgaagcctggagg | 1830 |
| | VH variant | gtccctgagactctcctgtgcagcctctggattcagtttcagtaaat | |
| | 4 | atggcatgtcttgggttcgccaggccccaggcaagggcctggagtgg | |
| | | gtcgcaaccattagtagtagtgggagtcgcacctactatccagacag | |
| | | tgtgaagggcagattcaccatctccagagacaatgccaagaacaccc | |
| | | tgtacctgcaaatgaacagtctgagagccgaggacacagccatgtat | |
| | | tactgtgccattagctgggacggtgctatggactactggggtcaagg | |
| | | gaccaccgtcaccgtctcctca | |
| Ab92 | IPN002 | EVQLVESGGALVKPGGSLRLSCAASGFSFSKYGMSWVRQAPGKGLEW | 1831 |
| | VH variant | VATISSSGSRTYYPDSVKGRFTISRDNAKNTLYLQMNSLRAEDTAMY | |
| | 4 | YCAISWDGAMDYWGQGTTVTVSS | |
| Ab93 | MC1 VH- | atggaatggacctgggtctttctcttcctcctgtcagtaactgcagg | 1832 |
| | 1374 | tgtccactcccaggttcagctgcagcagtctggagctgagctgatga | |
| | | agcctggggcctcagtgaagatatcctgcaaggctactggctacaca | |
| | | ttcagtaactactggatagagtgggtaaagcagaggcctggacatgg | |
| | | ccttgagtggattggagagattttacctggaagtgatagtattaagt | |
| | | acaatgagaatttcaagggcaaggccacattcactgcagatacatcc | |
| | | tccaacacagcctacatgcaactcagcagcctgacatctgaggactc | |
| | | tgccgtctattactgtgcaagaagggggaactacccagactactggg | |
| | | gccaaggcaccactctcacagtctcctcagccaaaacgacaccccca | |
| | | tctgtctatccactggcccctggatctgctgcccaaactaactccat | |
| | | ggtgaccctgggatgcctggtcaagggctatttccctgagccagtga | |
| | | cagtgacctggaactctggatccctgtccagcggtgtgcacaccttc | |
| | | ccagctgtcctgcagtctgacctctacactctgagcagctcagtgac | |
| | | tgtcccctccagcacctggcccagcgagaccgtcacctgcaacgttg | |
| | | cccacccggccagcagcaccaaggtggacaagaaaattgtgcccagg | |
| | | gattgtggttgtaagccttgcatatgtacagtcccagaagtatcatc | |
| | | tgtcttcatcttccccccaaagcccaaggatgtgctcaccattactc | |
| | | tgactcctaaggtcacgtgtgttgtggtagacatcagcaaggatgat | |
| | | cccgaggtccagttcagctggtttgtagatgatgtggaggtgcacac | |
| | | agctcagacgcaaccccgggaggagcagttcaacagcactttccgct | |
| | | cagtcagtgaacttcccatcatgcaccaggactggctcaatggcaag | |
| | | gagttcaaatgcagggtcaacagtgcagctttccctgcccccatcga | |
| | | gaaaaccatctccaaaaccaaaggcagaccgaaggctccacaggtgt | |
| | | acaccattccacctcccaaggagcagatggccaaggataaagtcagt | |
| | | ctgacctgcatgataacagacttcttccctgaagacattactgtgga | |
| | | gtggcagtggaatgggcagccagcggagaactacaagaacactcagc | |
| | | ccatcatggacacagatggctcttacttcgtctacagcaagctcaat | |
| | | gtgcagaagagcaactgggaggcaggaaatactttcacctgctctgt | |
| | | gttacatgagggcctgcacaaccaccatactgagaagagcctctccc | |
| | | actctcctggt | |
| Ab94 | MC1 VH- | gaggtgcagctggtgcagtctggagcagaggtgaaaaagcccgggga | 1833 |
| | 1326 | gtctctgaagatctcctgtaagggttctggctacacattcagtaact | |
| | | actggatagagtgggtgcgccagatgcccgggaaaggcctggagtgg | |
| | | atgggggagattttacctggaagtgatagtattaagtacgaaaagaa | |
| | | tttcaagggccaggtcaccatctcagccgacaagtccatcagcaccg | |
| | | cctacctgcagtggagcagcctgaaggcctcggacaccgccatgtat | |
| | | tactgtgcgagaagggggaactacgtggacgactggggccagggcac | |
| | | cctggtcaccgtctcctcagcttctaccaagggcccatcggtcttcc | |
| | | cgctagcgccctgctccaggagcacctccgagagcacagccgccctg | |
| | | ggctgcctggtcaaggactacttccccgaaccggtgacggtgtcgtg | |
| | | gaactcaggcgccctgaccagcggcgtgcacaccttcccggctgtcc | |
| | | tacagtcctcaggactctactccctcagcagcgtggtgaccgtgccc | |
| | | tccagcagcttgggcacgaagacctacacctgcaacgtagatcacaa | |
| | | gcccagcaacaccaaggtggacaagagagttgagtccaaatatggtc | |
| | | ccccatgcccaccctgcccagcacctgaggccgccgggggaccatca | |
| | | gtcttcctgttccccccaaaacccaaggacactctcatgatctcccg | |
| | | gacccctgaggtcacgtgcgtggtggtggacgtgagccaggaagacc | |
| | | ccgaggtccagttcaactggtacgtggatggcgtggaggtgcataat | |
| | | gccaagacaaagccgcgggaggagcagttcaacagcacgtaccgtgt | |
| | | ggtcagcgtcctcaccgtcctgcaccaggactggctgaacggcaagg | |
| | | agtacaagtgcaaggtctccaacaaaggcctcccgtcctccatcgag | |
| | | aaaaccatctccaaagccaaagggcagccccgagagccacaggtgta | |
| | | caccctgcccccatcccaggaggagatgaccaagaaccaggtcagcc | |
| | | tgacctgcctggtcaaaggcttctaccccagcgacatcgccgtggag | |
| | | tgggaaagcaatgggcagccggagaacaactacaagaccacgcctcc | |
| | | cgtgctggactccgacggctccttcttcctctacagcaggctaaccg | |
| | | tggacaagagcaggtggcaggaggggaatgtcttctcatgctccgtg | |
| | | atgcatgaggctctgcacaaccactacacacagaagagcctctccct | |
| | | gtctctgggt | |
| Ab95 | MC1 VH- | MEWTWVFLFLLSVTAGVHSQVQLQQSGAELMKPGASVKISCKATGYT | 1834 |
| | 458 | FSNYWIEWVKQRPGHGLEWIGEILPGSDSIKYNENFKGKATFTADTS | |
| | | SNTAYMQLSSLISEDSAVYYCARRGNYPDYWGQGTTLTVSSAKTTPP | |
| | | SVYPLAPGSAAQTNSMVTLGCLVKGYFPEPVTVTWNSGSLSSGVHTF | |
| | | PAVLQSDLYTLSSSVTVPSSTWPSETVICNVAHPASSTKVDKKIVPR | |
| | | DCGCKPCICTVPEVSSVFIFPPKPKDVLTITLTPKVTCVVVDISKDD | |
| | | PEVQFSWFVDDVEVHTAQTQPREEQFNSTFRSVSELPIMHQDWLNGK | |
| | | EFKCRVNSAAFPAPIEKTISKTKGRPKAPQVYTIPPPKEQMAKDKVS | |
| | | LTCMITDFFPEDITVEWQWNGQPAENYKNTQPIMDTDGSYFVYSKLN | |
| | | VQKSNWEAGNTFTCSVLHEGLHNHHTEKSLSHSPG | |
| Ab96 | MC1 VH- | EVQLVQSGAEVKKPGESLKISCKGSGYTFSNYWIEWVRQMPGKGLEW | 1835 |
| | 442 | MGEILPGSDSIKYEKNFKGQVTISADKSISTAYLQWSSLKASDTAMY | |
| | | YCARRGNYVDDWGQGTLVTVSSASTKGPSVFPLAPCSRSTSESTAAL | |
| | | GCLVKDYFPEPVTVSWNSGALTSGVHTFPAVLQSSGLYSLSSVVTVP | |
| | | SSSLGTKTYTCNVDHKPSNTKVDKRVESKYGPPCPPCPAPEAAGGPS | |
| | | VFLFPPKPKDTLMISRTPEVTCVVVDVSQEDPEVQFNWYVDGVEVHN | |
| | | AKTKPREEQFNSTYRVVSVLIVLHQDWLNGKEYKCKVSNKGLPSSIE | |
| | | KTISKAKGQPREPQVYTLPPSQEEMTKNQVSLTCLVKGFYPSDIAVE | |
| | | WESNGQPENNYKTTPPVLDSDGSFFLYSRLTVDKSRWQEGNVFSCSV | |
| | | MHEALHNHYTQKSLSLSLG | |
| Ab97 | MC1 VH- | EVQLVQSGAEVKKPGESLKISCKGSGYTFSNYWIEWVRQMPGKGLEW | 1836 |
| | 116 | MGEILPGSDSIKYEKNEKGQVTISADKSISTAYLQWSSLKASDTAMY | |
| | | YCARRGNYVDDWGQGTLVTVSS | |
| Ab98 | PHF1 VH- | gaggtccagctgcaacagtctggacctgagctggtgaagcctggggc | 1837 |
| | 1320 | ttcagtgaagatatcctgcaagacttctggatacacattcactgaat | |
| | | acaccatacactgggtgaagcagagccatggagagagccttgagtgg | |
| | | attggaggtattaatccaaacgatggtggtactatttacaaccagaa | |
| | | gttcaagggcaaggccacattgactgtagacaagtcctccaaaacag | |
| | | cctacatggagctccgcagcctgacatctgaggattctgcagtcttt | |
| | | tactgtgcaagagggccctccgccaggtttccttactggggccaagg | |
| | | gactctggtcactgtctctgcagccaaaacgacacccccatctgtct | |
| | | atccactggcccctggatctgctgcccaaactaactccatggtgacc | |
| | | ctgggatgcctggtcaagggctatttccctgagccagtgacagtgac | |
| | | ctggaactctggatccctgtccagcggtgtgcacaccttcccagctg | |
| | | tcctgcagtctgacctctacactctgagcagctcagtgactgtcccc | |
| | | tccagcacctggcccagcgagaccgtcacctgcaacgttgcccaccc | |
| | | ggccagcagcaccaaggtggacaagaaaattgtgcccagggattgtg | |
| | | gttgtaagccttgcatatgtacagtcccagaagtatcatctgtcttc | |
| | | atcttccccccaaagcccaaggatgtgctcaccattactctgactcc | |
| | | taaggtcacgtgtgttgtggtagacatcagcaaggatgatcccgagg | |
| | | tccagttcagctggtttgtagatgatgtggaggtgcacacagctcag | |
| | | acgcaaccccgggaggagcagttcaacagcactttccgctcagtcag | |
| | | tgaacttcccatcatgcaccaggactggctcaatggcaaggagttca | |
| | | aatgcagggtcaacagtgcagctttccctgcccccatcgagaaaacc | |
| | | atctccaaaaccaaaggcagaccgaaggctccacaggtgtacaccat | |
| | | tccacctcccaaggagcagatggccaaggataaagtcagtctgacct | |
| | | gcatgataacagacttcttccctgaagacattactgtggagtggcag | |
| | | tggaatgggcagccagcggagaactacaagaacactcagcccatcat | |
| | | ggacacagatggctcttacttcgtctacagcaagctcaatgtgcaga | |
| | | agagcaactgggaggcaggaaatactttcacctgctctgtgttacat | |
| | | gagggcctgcacaaccaccatactgagaagagcctctcccactctcc | |
| | | tggt | |
| Ab99 | PHF1 VH- | atgggatggagctggatctttctctttctcctgtcaggaactacagg | 1838 |
| | 1377 | tgtcctctctgaggtccagctgcaacagtctggacctgagctggtga | |
| | | agcctggggcttcagtgaagatatcctgcaagacttctggatacaca | |
| | | ttcactgaatacaccatacactgggtgaagcagagccatggagagag | |
| | | ccttgagtggattggaggtattaatccaaacgatggtggtactattt | |
| | | acaaccagaagttcaagggcaaggccacattgactgtagacaagtcc | |
| | | tccaaaacagcctacatggagctccgcagcctgacatctgaggattc | |
| | | tgcagtcttttactgtgcaagagggccctccgccaggtttccttact | |
| | | ggggccaagggactctggtcactgtctctgcagccaaaacgacaccc | |
| | | ccatctgtctatccactggcccctggatctgctgcccaaactaactc | |
| | | catggtgaccctgggatgcctggtcaagggctatttccctgagccag | |
| | | tgacagtgacctggaactctggatccctgtccagcggtgtgcacacc | |
| | | ttcccagctgtcctgcagtctgacctctacactctgagcagctcagt | |
| | | gactgtcccctccagcacctggcccagcgagaccgtcacctgcaacg | |
| | | ttgcccacccggccagcagcaccaaggtggacaagaaaattgtgccc | |
| | | agggattgtggttgtaagccttgcatatgtacagtcccagaagtatc | |
| | | atctgtcttcatcttccccccaaagcccaaggatgtgctcaccatta | |
| | | ctctgactcctaaggtcacgtgtgttgtggtagacatcagcaaggat | |
| | | gatcccgaggtccagttcagctggtttgtagatgatgtggaggtgca | |
| | | cacagctcagacgcaaccccgggaggagcagttcaacagcactttcc | |
| | | gctcagtcagtgaacttcccatcatgcaccaggactggctcaatggc | |
| | | aaggagttcaaatgcagggtcaacagtgcagctttccctgcccccat | |
| | | cgagaaaaccatctccaaaaccaaaggcagaccgaaggctccacagg | |
| | | tgtacaccattccacctcccaaggagcagatggccaaggataaagtc | |
| | | agtctgacctgcatgataacagacttcttccctgaagacattactgt | |
| | | ggagtggcagtggaatgggcagccagcggagaactacaagaacactc | |
| | | agcccatcatggacacagatggctcttacttcgtctacagcaagctc | |
| | | aatgtgcagaagagcaactgggaggcaggaaatactttcacctgctc | |
| | | tgtgttacatgagggcctgcacaaccaccatactgagaagagcctct | |
| | | cccactctcctggt | |
| Ab100 | PHF1 VH- | gaggtccagctgcaacagtctggacctgagctggtgaagcctggggc | 1839 |
| | 351 | ttcagtgaagatatcctgcaagacttctggatacacattcactgaat | |
| | | acaccatacactgggtgaagcagagccatggagagagccttgagtgg | |
| | | attggaggtattaatccaaacgatggtggtactatttacaaccagaa | |
| | | gttcaagggcaaggccacattgactgtagacaagtcctccaaaacag | |
| | | cctacatggagctccgcagcctgacatctgaggattctgcagtcttt | |
| | | tactgtgcaagagggccctccgccaggtttccttactggggccaagg | |
| | | gactctggtcactgtctctgca | |
| Ab101 | PHF1 VH- | atgggatggagctggatctttctctttctcctgtcaggaactacagg | 1840 |
| | 699 | tgtcctctctgaggtccagctgcaacagtctggacctgagctggtga | |
| | | agcctggggcttcagtgaagatatcctgcaagacttctggatacaca | |
| | | ttcactgaatacaccatacactgggtgaagcagagccatggagagag | |
| | | ccttgagtggattggaggtattaatccaaacgatggtggtactattt | |
| | | acaaccagaagttcaagggcaaggccacattgactgtagacaagtcc | |
| | | tccaaaacagcctacatggagctccgcagcctgacatctgaggattc | |
| | | tgcagtcttttactgtgcaagagggccctccgccaggtttccttact | |
| | | ggggccaagggactctggtcactgtctctgcagccaaaacgacaccc | |
| | | ccatctgtctatccactggcccctggatctgctgcccaaactaactc | |
| | | catggtgaccctgggatgcctggtcaagggctatttccctgagccag | |
| | | tgacagtgacctggaactctggatccctgtccagcggtgtgcacacc | |
| | | ttcccagctgtcctgcagtctgacctctacactctgagcagctcagt | |
| | | gactgtcccctccagcacctggcccagcgagaccgtcacctgcaacg | |
| | | ttgcccacccggccagcagcaccaaggggacaagaaaatt | |
| Ab102 | PHF1 VH- | atgggatggagctggatctttctctttctcctgtcaggaactacagg | 1841 |
| | 717 | tgtcctctctgaggtccagctgcaacagtctggacctgagctggtga | |
| | | agcctggggcttcagtgaagatatcctgcaagacttctggatacaca | |
| | | ttcactgaatacaccatacactgggtgaagcagagccatggagagag | |
| | | ccttgagtggattggaggtattaatccaaacgatggtggtactattt | |
| | | acaaccagaagttcaagggcaaggccacattgactgtagacaagtcc | |
| | | tccaaaacagcctacatggagctccgcagcctgacatctgaggattc | |
| | | tgcagtcttttactgtgcaagagggccctccgccaggtttccttact | |
| | | ggggccaagggactctggtcactgtctctgcagccaaaacgacaccc | |
| | | ccatctgtctatccactggcccctggatctgctgcccaaactaactc | |
| | | catggtgaccctgggatgcctggtcaagggctatttccctgagccag | |
| | | tgacagtgacctggaactctggatccctgtccagcggtgtgcacacc | |
| | | ttcccagctgtcctgcagtctgacctctacactctgagcagctcagt | |
| | | gactgtcccctccagcacctggcccagcgagaccgtcacctgcaacg | |
| | | ttgcccacccggccagcagcaccaaggtggacaagaaaattgtgccc | |
| | | agggattgtggt | |
| Ab103 | PHF1 VH- | atgggatggagctggatctttctctttctcctgtcaggaactacagg | 1842 |
| | 744 | tgtcctctctgaggtccagctgcaacagtctggacctgagctggtga | |
| | | agcctggggcttcagtgaagatatcctgcaagacttctggatacaca | |
| | | ttcactgaatacaccatacactgggtgaagcagagccatggagagag | |
| | | ccttgagtggattggaggtattaatccaaacgatggtggtactattt | |
| | | acaaccagaagttcaagggcaaggccacattgactgtagacaagtcc | |
| | | tccaaaacagcctacatggagctccgcagcctgacatctgaggattc | |
| | | tgcagtcttttactgtgcaagagggccctccgccaggtttccttact | |
| | | ggggccaagggactctggtcactgtctctgcagccaaaacgacaccc | |
| | | ccatctgtctatccactggcccctggatctgctgcccaaactaactc | |
| | | catggtgaccctgggatgcctggtcaagggctatttccctgagccag | |
| | | tgacagtgacctggaactctggatccctgtccagcggtgtgcacacc | |
| | | ttcccagctgtcctgcagtctgacctctacactctgagcagctcagt | |
| | | gactgtcccctccagcacctggcccagcgagaccgtcacctgcaacg | |
| | | ttgcccacccggccagcagcaccaaggtggacaagaaaattgtgccc | |
| | | agggattgtggttgtaagccttgcatatgtacagtccca | |
| Ab104 | PHF1 VH- | atgggatggagctggatctttctctttctcctgtcaggaactacagg | 1843 |
| | 753 | tgtcctctctgaggtccagctgcaacagtctggacctgagctggtga | |
| | | agcctggggcttcagtgaagatatcctgcaagacttctggatacaca | |
| | | ttcactgaatacaccatacactgggtgaagcagagccatggagagag | |
| | | ccttgagtggattggaggtattaatccaaacgatggtggtactattt | |
| | | acaaccagaagttcaagggcaaggccacattgactgtagacaagtcc | |
| | | tccaaaacagcctacatggagctccgcagcctgacatctgaggattc | |
| | | tgcagtcttttactgtgcaagagggccctccgccaggtttccttact | |
| | | ggggccaagggactctggtcactgtctctgcagccaaaacgacaccc | |
| | | ccatctgtctatccactggcccctggatctgctgcccaaactaactc | |
| | | catggtgaccctgggatgcctggtcaagggctatttccctgagccag | |
| | | tgacagtgacctggaactctggatccctgtccagcggtgtgcacacc | |
| | | ttcccagctgtcctgcagtctgacctctacactctgagcagctcagt | |
| | | gactgtcccctccagcacctggcccagcgagaccgtcacctgcaacg | |
| | | ttgcccacccggccagcagcaccaaggtggacaagaaaattgtgccc | |
| | | agggattgtggttgtaagccttgcatatgtacagtcccagaagtatc | |
| | | a | |
| Ab105 | PHF1 VH- | MGWSWIFLFLLSGTTGVLSEVQLQQSGPELVKPGASVKISCKTSGYT | 1844 |
| | 459 | FTEYTIHWVKQSHGESLEWIGGINPNDGGTIYNQKFKGKATLTVDKS | |
| | | SKTAYMELRSLISEDSAVFYCARGPSARFPYWGQGTLVTVSAAKTTP | |
| | | PSVYPLAPGSAAQTNSMVTLGCLVKGYFPEPVTVTWNSGSLSSGVHT | |
| | | FPAVLQSDLYTLSSSVTVPSSTWPSETVTCNVAHPASSTKVDKKIVP | |
| | | RDCGCKPCICTVPEVSSVFIFPPKPKDVLTITLTPKVTCVVVDISKD | |
| | | DPEVQFSWFVDDVEVHTAQTQPREEQFNSTFRSVSELPIMHQDWLNG | |
| | | KEFKCRVNSAAFPAPIEKTISKTKGRPKAPQVYTIPPPKEQMAKDKV | |
| | | SLTCMITDFFPEDITVEWQWNGQPAENYKNTQPIMDTDGSYFVYSKL | |
| | | NVQKSNWEAGNTFTCSVLHEGLHNHHTEKSLSHSPG | |
| Ab106 | PHF1 VH | atgggatggagctggatctttctctttctcctgtcaggaactacagg | 1845 |
| | + | tgtcctctctgctgccgaggtccagctgcaacagtctggacctgagc | |
| | | tggtgaagcctggggcttcagtgaagatatcctgcaagacttctgga | |
| | | tacacattcactgaatacaccatacactgggtgaagcagagccatgg | |
| | | agagagccttgagtggattggaggtattaatccaaacgatggtggta | |
| | | ctatttacaaccagaagttcaagggcaaggccacattgactgtagac | |
| | | aagtcctccaaaacagcctacatggagctccgcagcctgacatctga | |
| | | ggattctgcagtcttttactgtgcaagagggccctccgccaggtttc | |
| | | cttactggggccaagggactctggtcactgtctctgcagccaaaacg | |
| | | acacccccatctgtctatccactggcccctggatctgctgcccaaac | |
| | | taactccatggtgaccctgggatgcctggtcaagggctatttccctg | |
| | | agccagtgacagtgacctggaactctggatccctgtccagcggtgtg | |
| | | cacaccttcccagctgtcctgcagtctgacctctacactctgagcag | |
| | | ctcagtgactgtcccctccagcacctggcccagcgagaccgtcacct | |
| | | gcaacgttgcccacccggccagcagcaccaaggtggacaagaaaatt | |
| | | gtgcccagggattgtggttgtaagccttgcatatgtacagtcccaga | |
| | | agtatcatctgtcttcatcttccccccaaagcccaaggatgtgctca | |
| | | ccattactctgactcctaaggtcacgtgtgttgtggtagacatcagc | |
| | | aaggatgatcccgaggtccagttcagctggtttgtagatgatgtgga | |
| | | ggtgcacacagctcagacgcaaccccgggaggagcagttcaacagca | |
| | | ctttccgctcagtcagtgaacttcccatcatgcaccaggactggctc | |
| | | aatggcaaggagttcaaatgcagggtcaacagtgcagctttccctgc | |
| | | ccccatcgagaaaaccatctccaaaaccaaaggcagaccgaaggctc | |
| | | cacaggtgtacaccattccacctcccaaggagcagatggccaaggat | |
| | | aaagtcagtctgacctgcatgataacagacttcttccctgaagacat | |
| | | tactgtggagtggcagtggaatgggcagccagcggagaactacaaga | |
| | | acactcagcccatcatggacacagatggctcttacttcgtctacagc | |
| | | aagctcaatgtgcagaagagcaactgggaggcaggaaatactttcac | |
| | | ctgctctgtgttacatgagggcctgcacaaccaccatactgagaaga | |
| | | gcctctcccactctcctggt | |
| Ab107 | PT1 VH- | caggttcagctgcagcagtctggaactgagctgatgaagcctggggc | 1846 |
| | 357 | ctcagtgaagatatcctgcaaggctactggctacacattcagtagct | |
| | | cctggatggggtgggttaagcagaggcctggacatggccttgagtgg | |
| | | attggagacattttacctggaagtggtggtactaactacaatgagag | |
| | | gttcaagggcaaggcctcattcactgcagaaacatcctccaacacag | |
| | | cctacatgcaactcagcagcctgacatctgaggactctgccgtctat | |
| | | tactgtgtaagaagctactatgattacgaccgctttgctaactgggg | |
| | | ccaagggactctggtcactgtctctgca | |
| Ab108 | PT1 VH- | QVQLQQSGTELMKPGASVKISCKATGYTFSSSWMGWVKQRPGHGLEW | 1847 |
| | 119 | IGDILPGSGGTNYNERFKGKASFTAETSSNTAYMQLSSLTSEDSAVY | |
| | | YCVRSYYDYDRFANWGQGTLVTVSA | |
| Ab109 | PT3 VH- | gaagtgaagctggtggagtctgggggagacttagtgaagcctggagg | 1848 |
| | 354 | gtccctgaaactctcctgtgcagcctctggattcactttcagtagct | |
| | | atgccatgtcttgggttcgccagaatccagagaagaggctggagtgg | |
| | | gtcgcatccattagtaagggtggtaacacctactatccaaacagcgt | |
| | | gaagggccgattcaccatctccagagataatgccaggaacatcctgt | |
| | | acctgcaaatgagcagtctgaggtctgaggacacggccctttattac | |
| | | tgtgcaagaggctggggtgattacgggtggtttgcttactggggcca | |
| | | agtgactctggtcactgtctctgca | |
| Ab110 | PT3 VH- | EVKLVESGGDLVKPGGSLKLSCAASGFTFSSYAMSWVRQNPEKRLEW | 1849 |
| | 118 | VASISKGGNTYYPNSVKGRFTISRDNARNILYLQMSSLRSEDTALYY | |
| | | CARGWGDYGWFAYWGQVTLVTVSA | |
| Ab111 | PT3 VH | gaagtgaaactggtggaaagcggcggcgatctggtgaaaccgggcgg | 1850 |
| | Bioinformatics | cagcctgaaactgagctgcgcggcgagcggctttacctttagcagct | |
| | | atgcgatgagctgggtgcgccagaacccggaaaaacgcctggaatgg | |
| | | gtggcgagcattagcaaaggcggcaacacctattatccgaacagcgt | |
| | | gaaaggccgctttaccattagccgcgataacgcgcgcaacattctgt | |
| | | atctgcagatgagcagcctgcgcagcgaagataccgcgctgtattat | |
| | | tgcgcgcgcggctggggcgattatggctggtttgcgtattggggcca | |
| | | ggtgaccctggtgaccgtgagcgcg | |
| Ab112 | PT3 VH | gaggtgaagctggtggagagcggaggagacctggtcaagcccggggg | 1851 |
| | Bioinformatics | ctccctgaagctcagctgtgccgccagcggcttcaccttctcctcct | |
| | 2 | atgccatgtcctgggtccggcagaaccctgagaagaggctggagtgg | |
| | | gtggcctccatctccaagggcggcaacacctactatcccaacagcgt | |
| | | gaaaggaagatttaccatcagccgggacaatgccaggaacatcctct | |
| | | acctgcagatgagcagcctgcggtctgaggacacagccctgtactac | |
| | | tgcgcccggggctggggggactatggatggtttgcctactggggcca | |
| | | ggtgaccctggttactgtgtctgcc | |
| Ab113 | PT3 VH | gaggtgaagctggtggagagcggcggcgacctggtgaagcccggcgg | 1852 |
| | EMBOSS | cagcctgaagctgagctgcgccgccagcggcttcaccttcagcagct | |
| | | acgccatgagctgggtgaggcagaaccccgagaagaggctggagtgg | |
| | | gtggccagcatcagcaagggcggcaacacctactaccccaacagcgt | |
| | | gaagggcaggttcaccatcagcagggacaacgccaggaacatcctgt | |
| | | acctgcagatgagcagcctgaggagcgaggacaccgccctgtactac | |
| | | tgcgccaggggctggggcgactacggctggttcgcctactggggcca | |
| | | ggtgaccctggtgaccgtgagcgcc | |
| Ab114 | PT3 VH | gaggtgaaacttgtggagagcggcggggacctggtcaagccaggcgg | 1853 |
| | Geneinfinity | cagcctgaagctgagctgtgccgcctccggcttcaccttcagcagct | |
| | | atgccatgtcctgggtccggcagaaccctgagaagaggctggagtgg | |
| | | gtggccagcatcagcaaaggaggcaacacctactatcccaacagcgt | |
| | | gaagggccgcttcaccatctcccgggacaatgccaggaacatcctct | |
| | | acctgcagatgagctccctgcggtctgaggacacagccctgtactac | |
| | | tgcgcccggggctggggagactatggatggtttgcctactggggcca | |
| | | ggtgaccctggtgacagtgtctgcc | |
| Ab115 | PT3 VH | gaggtgaagctggtggagtctggcggagacctggtgaagccaggcgg | 1854 |
| | Genescript | aagcctgaagctgtcctgcgccgcttctggcttcacctttagctcct | |
| | | acgccatgagctgggtgcggcagaacccagagaagcgcctggagtgg | |
| | | gtggcttccatctctaagggcggaaacacctactaccctaacagcgt | |
| | | gaagggaaggttcacaatctccagggataacgccagaaacatcctgt | |
| | | acctgcagatgtctagcctgaggtccgaggacacagccctgtactac | |
| | | tgtgctcggggctggggagattacggctggtttgcctactggggaca | |
| | | ggtgaccctggtgacagtgtctgct | |
| Ab116 | PT3 VH | gaggtgaaacttgtggagagcggcggggacctggtgaagccaggcgg | 1855 |
| | IDT | cagcctgaagctgagctgtgccgcctccggcttcaccttcagcagct | |
| | | atgccatgtcctgggtccggcagaaccctgagaagaggctggagtgg | |
| | | gtggccagcatcagcaaaggaggcaacacctactaccccaacagcgt | |
| | | caagggccgcttcaccatctcccgggacaatgccaggaacatcctgt | |
| | | acctgcagatgagctccctgcggtctgaggacacagccctgtattac | |
| | | tgcgcccggggctggggagactatggatggtttgcctactggggcca | |
| | | ggtgaccctggtcaccgtgtctgcc | |
| Ab117 | PT3 VH | gaggtgaaacttgtggagtctggaggagacctggtgaagccaggagg | 1856 |
| | NUS | cagcctgaagctgagctgtgctgccagtggcttcaccttcagcagct | |
| | | atgccatgtcctgggtccggcagaaccctgagaagaggctggagtgg | |
| | | gtggccagcatctccaagggcggcaacacctactatcccaacagcgt | |
| | | caaaggaagatttaccatcagccgggacaatgccaggaacatcctct | |
| | | acctgcagatgagctccctgcggtctgaggacacagccctgtactac | |
| | | tgtgcccggggctggggagattatggatggtttgcctactggggcca | |
| | | ggtgaccctggtcactgtgtctgct | |
| Ab118 | PT3 VH | gaggtgaaattagtggagtctggaggagacctggtgaagccaggagg | 1857 |
| | NUS2 | cagcctgaagctgagctgtgctgcttctggcttcaccttcagcagct | |
| | | atgccatgtcctgggtcagacagaatcctgagaagagactggagtgg | |
| | | gtggccagcatctccaaaggtggcaacacctactatcccaacagtgt | |
| | | taaaggaagatttaccatcagcagagataatgcaagaaacatcctct | |
| | | acctgcagatgtcttctttaagaagtgaagatacagccctgtactac | |
| | | tgtgccagaggctggggagattatggatggtttgcctactggggcca | |
| | | ggtgacattagttactgtgtctgct | |
| Ab119 | PT3 VH | gaggtgaagctggtggagagcggcggggacctggtcaagcccggggg | 1858 |
| | NUS3 | cagcctgaagctcagctgtgccgcctccggcttcaccttcagcagct | |
| | | atgccatgtcctgggtccggcagaaccctgagaagaggctggagtgg | |
| | | gtggccagcatcagcaagggcggcaacacctactatcccaacagcgt | |
| | | gaaaggccgcttcaccatctcccgggacaatgccaggaacatcctgt | |
| | | acctgcagatgagctccctgcgcagcgaggacacagccctctactac | |
| | | tgcgcccggggctggggagactatggatggtttgcctactggggcca | |
| | | ggtgaccctggttactgtgtctgcc | |
| Ab120 | PT3 VH | gaggtgaagctggtggagagcggcggcgacctggtgaagcctggcgg | 1859 |
| | Snapgene | cagcctgaagctgagctgcgccgccagcggcttcaccttcagcagct | |
| | | acgccatgagctgggtgagacagaaccctgagaagagactggagtgg | |
| | | gtggccagcatcagcaagggcggcaacacctactaccctaacagcgt | |
| | | gaagggcagattcaccatcagcagagacaacgccagaaacatcctgt | |
| | | acctgcagatgagcagcctgagaagcgaggacaccgccctgtactac | |
| | | tgcgccagaggctggggcgactacggctggttcgcctactggggcca | |
| | | ggtgaccctggtgaccgtgagcgcc | |
| Ab121 | VH | EVHLVESGGALVKPGGSLRLSCAASGFSFS | 1860 |
| Ab122 | IPN002 | atgaagttgcctgttaggctgttggtgctgatgttctggattcctgc | 1861 |
| | (VL | ttccagcagt | |
| | Signal) | | |
| Ab123 | PHF1 (VL | atgagtcctgcccagttcctgtttctgttagtgctctggattcggga | 1862 |
| | Signal) | aaccaacggt | |
| Ab124 | PHF1 (VL | gccgccaccatgagtcctgcccagttcctgtttctgttagtgctctg | 1863 |
| | Signal 72) | gattcgggaaaccaacggtgctgcc | |
| Ab125 | VL | cgggctgatgctgcaccaactgtatccatcttcccaccatccagtga | 1864 |
| | (constant) | gcagttaacatctggaggtgcctcagtcgtgtgcttcttgaacaact | |
| | | tctaccccaaagacatcaatgtcaagtggaagattgatggcagtgaa | |
| | | cgacaaaatggcgtcctgaacagttggactgatcaggacagcaaaga | |
| | | cagcacctacagcatgagcagcaccctcacgttgaccaaggacgagt | |
| | | atgaacgacataacagctatacctgtgaggccactcacaagacatca | |
| | | acttcacccattgtcaagagcttcaacaggaatgagtgt | |
| Ab126 | 7295-M6 | RSSQTIVHSNGNTYLE | 1865 |
| | LCDR | | |
| Ab127 | 7295-M6 | FQGSHVPFT | 1866 |
| | LCDR | | |
| Ab128 | 7297-2M1 | KASQDINKYIA | 1867 |
| | LCDR | | |
| Ab129 | 7297-2M1 | YTSTLQS | 1868 |
| | LCDR | | |
| Ab130 | 7297-2M1 | LQYDHLLT | 1869 |
| | LCDR | | |
| Ab131 | 7298-M1 | RASKSVSTSDYSYMH | 1870 |
| | LCDR | | |
| Ab132 | 7298-M1 | LASNLES | 1871 |
| | LCDR | | |
| Ab133 | 7298-M1 | QHSRELPFT | 1872 |
| | LCDR | | |
| Ab134 | 7299-M2 | KSSQSLLYSDGKTFLN | 1873 |
| | LCDR | | |
| Ab135 | 7299-M2 | LVSKLQS | 1874 |
| | LCDR | | |
| Ab136 | 7299-M2 | VQGTHFPYT | 1875 |
| | LCDR | | |
| Ab137 | 7299-M5 | KSSQSLLYSDGKTYLN | 1876 |
| | LCDR | | |
| Ab138 | 7299-M5 | QVSKLDP | 1877 |
| | LCDR | | |
| Ab139 | 7299-M5 | LQGTYYPHT | 1878 |
| | LCDR | | |
| Ab140 | 7299-M9 | LQGTYYPH | 1879 |
| | LCDR | | |
| Ab141 | C10.2 | QASQGTSINLN | 1880 |
| | LCDR1 | | |
| Ab142 | C10.2 | GASNLED | 1881 |
| | LCDR2 | | |
| Ab143 | C10.2 | LQHTYLP | 1882 |
| | LCDR3 | | |
| Ab144 | C5.2 | QASQDTSINLN | 1883 |
| | LCDR1 | | |
| Ab145 | C8.3 | GSSNLED | 1884 |
| | LCDR2 | | |
| Ab146 | C8.3 | LQHSYLP | 1885 |
| | LCDR3 | | |
| Ab147 | D1.2 | RSSQSLVHSNGNTYLH | 1886 |
| | LCDR1 | | |
| Ab148 | D1.2 | KVSNRFS | 1887 |
| | LCDR2 | | |
| Ab149 | D1.2 | SQSTHVP | 1888 |
| | LCDR3 | | |
| Ab150 | IPN002 | WYLQKPGQSPQLLXY | 1889 |
| | LCDR1 | | |
| Ab151 | IPN002 | GVPDRFSGSGSGTDFTLKISRVEAEDVGXYYC | 1890 |
| | LCDR2 | | |
| Ab152 | IPN002 | FGGGTKVEIK | 1891 |
| | LCDR3 | | |
| Ab153 | LCDR1 | RSSQTILHSNGNTYLE | 1892 |
| Ab154 | LCDR1 | KSSQSIVHSNGNTYLE | 1893 |
| Ab155 | LCDR1 | WYLQKPGQSPQLLVY | 1894 |
| Ab156 | LCDR2 | KVSKRFS | 1895 |
| Ab157 | LCDR2 | GVPDRFSGSGSGTDFTLKISRVEAEDVGTYYC | 1896 |
| Ab158 | LCDR3 | FQGSLVPWA | 1897 |
| Ab159 | MC1 | RSSQSLVHSNQNTYLH | 1898 |
| | LCDR1 | | |
| Ab160 | MC1 | YKVDNRFS | 1899 |
| | LCDR2 | | |
| Ab161 | MC1 | SQSTLVPLT | 1900 |
| | LCDR3 | | |
| Ab162 | PT1 | SESLLHSNGNTY | 1901 |
| | LCDR1 | | |
| | (Chothia) | | |
| Ab163 | PT1 | RSSESLLHSNGNTYLY | 1902 |
| | LCDR1 | | |
| | (Kabat) | | |
| Ab164 | PT1 | RMS | 1903 |
| | LCDR2 | | |
| | (Chothia) | | |
| Ab165 | PT1 | RMSNLAS | 1904 |
| | LCDR2 | | |
| | (Kabat) | | |
| Ab166 | PT1 | YLEYPL | 1905 |
| | LCDR3 | | |
| | (Chothia) | | |
| Ab167 | PT1 | MQYLEYPLT | 1906 |
| | LCDR3 | | |
| | (Kabat) | | |
| Ab168 | PT3 | SQDINRY | 1907 |
| | LCDR1 | | |
| | (Chothia) | | |
| Ab169 | PT3 | KASQDINRYLN | 1908 |
| | LCDR1 | | |
| | (Kabat) | | |
| Ab170 | PT3 | RAN | 1909 |
| | LCDR2 | | |
| | (Chothia) | | |
| Ab171 | PT3 | RANRLLD | 1910 |
| | LCDR2 | | |
| | (Kabat) | | |
| Ab172 | PT3 | YDEFPL | 1911 |
| | LCDR3 | | |
| | (Chothia) | | |
| Ab173 | PT3 | LQYDEFPLT | 1912 |
| | LCDR3 | | |
| | (Kabat) | | |
| Ab174 | 7295-M6 | DIVLTQTPLSLPVSLGDPASISCRSSQTIVHSNGNTYLEWYLQKPGQ | 1913 |
| | VL | SPKLLIYKVSNRFSGVPDRFSGSGSGTDFTLKISRVEAEDLGVYYCF | |
| | | QGSHVPFTFGSGTKLEIKRADAAPTVST | |
| Ab175 | 7297-2M1 | DIVLTQTPSSLSASLGGKVTITCKASQDINKYIAWYQHKPGKGPRLL | 1914 |
| | VL | IHYTSTLQSGIPSRFSGSGSGRDYSFSISNLEPEDIATYYCLQYDHL | |
| | | LIFGAGTKLELKRADAAPTVST | |
| Ab176 | 7298-M1 | DIVLIQSPTSLAVSLGQRATISCRASKSVSTSDYSYMHWYQQKPGQP | 1915 |
| | VL | PKLLIYLASNLESGVPARFSGSGSGTDFTLNIHPVEEEDAATYYCQH | |
| | | SRELPFTFGGGTKLEIKRADAAPTVST | |
| Ab177 | 7299-M2 | DIVLTQTPLTLSVTIGQPASISCKSSQSLLYSDGKTFLNWLLQSPGQ | 1916 |
| | VL | SPRLLIYLVSKLQSGVPDRFSGSGSGTDFTLKISRVEAEDLGVYYCV | |
| | | QGTHEPYTFGGGTKLEIKRADAAPTVST | |
| Ab178 | 7299-M5 | DIVMTQSPLSLSVTIGQPASISCKSSQSLLYSDGKTYLNWLQQRPGQ | 1917 |
| | VL | SPKRLVYQVSKLDPGIPDRFSGSGSETDFTLKLSRVEAEDLGVYYCL | |
| | | QGTYYPHTFGGGTKLEIKRADAAPTVST | |
| Ab179 | 7299-M9 | DIVITQSPLSLSVTIGQPASISCKSSQSLLYSDGKTYLNWLQQRPGQ | 1918 |
| | VL | SPKRLVYQVSKLDPGIPDRESGSGSETDFTLKLSRVEAEDLGVYYCL | |
| | | QGTYYPHTFGGGTKLEIKRADAAPTVST | |
| Ab180 | C10.2 VL- | DVQMIQSPSSLSASLGDIVTMTCQASQGISINLNWFQQKPGKAPKLL | 1919 |
| | 107 | IYGASNLEDGVPSRFSGSRYGTDFTLTISSLEDEDMATYFCLQHTYL | |
| | | PFTFGSGTKLEIK | |
| Ab181 | C10.2 VL- | DVQMIQSPSSLSASLGDIVTMTCQASQGISINLNWFQQKPGKAPKLL | 1920 |
| | 214 | IYGASNLEDGVPSRFSGSRYGTDFTLTISSLEDEDMATYFCLQHTYL | |
| | | PFTFGSGTKLEIKRADAAPTVSIFPPSSEQLTSGGASVVCFLNNFYP | |
| | | KDINVKWKIDGSERQNGVLNSWTDQDSKDSTYSMSSTLTLTKDEYER | |
| | | HNSYTCEATHKTSTSPIVKSFNRNEC | |
| Ab182 | C10.2 VL | gacgtgcagatgatccagagccccagcagcctgagcgccagcctggg | 1921 |
| | Bioinformatics | cgacatcgtgaccatgacctgccaggccagccagggcaccagcatca | |
| | | acctgaactggttccagcagaagcccggcaaggcccccaagctgctg | |
| | | atctacggcgccagcaacctggaggacggcgtgcccagcaggttcag | |
| | | cggcagcaggtacggcaccgacttcaccctgaccatcagcagcctgg | |
| | | aggacgaggacatggccacctacttctgcctgcagcacacctacctg | |
| | | cccttcaccttcggcagcggcaccaagctggagatcaag | |
| Ab183 | C10.2 VL | gacgttcagatgatccagagccccagcagcctgagcgccagcctggg | 1922 |
| | EMBOSS | cgacatcgtgaccatgacctgccaggccagccagggcaccagcatca | |
| | | acctgaactggttccagcagaagcccggcaaggcccccaagctgctg | |
| | | atctacggcgccagcaacctggaggacggcgtgcccagccggttcag | |
| | | cggcagccggtacggcaccgacttcaccctgaccatcagcagcctgg | |
| | | aggacgaggacatggccacctacttctgcctgcagcacacctacctg | |
| | | cccttcaccttcggcagcggcaccaagctggagatcaag | |
| Ab184 | C10.2 VL | gatgtgcagatgatccagagcccttcttccctctccgcctccctggg | 1923 |
| | GeneInfinity | cgacatcgtgaccatgacctgccaggccagccagggcaccagcatca | |
| | | acctgaactggttccagcagaagcccgggaaggcccccaagctcctc | |
| | | atctacggcgcctcaaatttggaagatggagtgcccagccgcttctc | |
| | | cgggtcccgctatggaacagacttcacactgaccatcagcagcctgg | |
| | | aggatgaggacatggccacctacttctgcctgcagcacacatacctg | |
| | | cccttcaccttcggcagcgggaccaagctggagatcaag | |
| Ab185 | C10.2 VL | gacgtgcagatgatccagagcccctccagcctgagcgcctcgctggg | 1924 |
| | GregThatcher | ggacatcgtgaccatgacctgccaggcctcccagggcaccagcatca | |
| | | acctcaactggttccagcagaagcccggcaaggcccccaagctgctg | |
| | | atctacggggccagcaacctggaggacggcgtgcccagccgcttcag | |
| | | cggctcccgctacggcacggacttcacgctgaccatctcctccctgg | |
| | | aggacgaggacatggccacctacttctgcctgcagcacacctacctg | |
| | | cccttcaccttcggcagcgggaccaagctggagatcaag | |
| Ab186 | C10.2 VL | gacgtgcagatgatccagagccccagctccctcagcgcctccctggg | 1925 |
| | IDT | ggacatcgtgaccatgacctgccaggccagccagggcaccagcatca | |
| | | acctcaactggttccagcagaagcccggcaaggcccccaagctgctg | |
| | | atctacggggcctccaacctggaggacggcgtgccctcccgcttcag | |
| | | cggcagccgctacggcacggacttcacgctgaccatcagcagcctgg | |
| | | aggacgaggacatggccacctacttctgcctgcagcacacctacctg | |
| | | cccttcaccttcgggagcgggaccaagttggagatcaag | |
| Ab187 | C10.2 VL | gacgtgcagatgatccagagccccagcagcctgagcgcctcgctggg | 1926 |
| | InSilico | ggacatcgtgaccatgacctgccaggcctcccagggcaccagcatca | |
| | | acctcaactggttccagcagaagcccggcaaggcccccaagctcctc | |
| | | atctacggggccagcaacctggaggacggcgtgccctcccgcttcag | |
| | | cggctcccgctacggcacggacttcacgctgaccatctcctccctgg | |
| | | aggacgaggacatggccacctacttctgcctgcagcacacctacctg | |
| | | cccttcaccttcggcagcgggaccaagctggagatcaag | |
| Ab188 | C10.2 VL | gacgttcagatgatccagtccccctcctccctgtccgcctccctggg | 1927 |
| | MolBio | cgacatcgtgaccatgacctgccaggcctcccagggcacctccatca | |
| | | acctgaactggttccagcagaagcccggcaaggcccccaagctgctg | |
| | | atctacggcgcctccaacctggaggacggcgtgccctcccggttctc | |
| | | cggctcccggtacggcaccgacttcaccctgaccatctcctccctgg | |
| | | aggacgaggacatggccacctacttctgcctgcagcacacctacctg | |
| | | cccttcaccttcggctccggcaccaagctggagatcaag | |
| Ab189 | C10.2 VL | gacgtgcagatgatccagagcccctcctccctgagcgccagcctggg | 1928 |
| | N2P | ggacatcgtgaccatgacctgccaggcctcccagggcaccagcatca | |
| | | acctcaactggttccagcagaagcccggcaaggcccccaagctcctc | |
| | | atctacggggccagcaacctggaggacggcgtgcccagccgcttcag | |
| | | cggctcccgctacggcacggacttcacgctgaccatcagcagcctgg | |
| | | aggacgaggacatggccacctacttctgcctgcagcacacctacctg | |
| | | cccttcaccttcggcagcgggaccaagctggagatcaag | |
| Ab190 | C10.2 VL | gacgttcagatgatccagagccctagcagcctgagcgccagcctggg | 1929 |
| | Snapgene | cgacatcgtgaccatgacctgccaggccagccagggcaccagcatca | |
| | | acctgaactggttccagcagaagcctggcaaggcccctaagctgctg | |
| | | atctacggcgccagcaacctggaggacggcgtgcctagccgtttcag | |
| | | cggcagccgttacggcaccgacttcaccctgaccatcagcagcctgg | |
| | | aggacgaggacatggccacctacttctgcctgcagcacacctacctg | |
| | | cctttcaccttcggcagcggcaccaagctggagatcaag | |
| Ab191 | C10.2 VL | gacgttcagatgatccagagccctagcagcctgagcgccagcctggg | 1930 |
| | Vector NTI | cgacatcgtgaccatgacctgccaggccagccagggcaccagcatca | |
| | | acctgaactggttccagcagaagcctggcaaggcccctaagctgctg | |
| | | atctacggcgccagcaacctggaggacggcgtgcccagccggttcag | |
| | | cggcagccggtacggcaccgacttcaccctgaccatcagcagcctgg | |
| | | aggacgaggacatggccacctacttctgcctgcagcacacctacctg | |
| | | cccttcaccttcggcagcggcaccaagctggagatcaag | |
| Ab192 | C5.2 VL | DVQMIQSPSSLSASLGDIVTMTCQASQDTSINLNWFQQKPGKAPKLL | 1931 |
| | | IYGASNLEDGVPSRFSGSRYGTDFTLTISSLEDEDMATYFCLQHTYL | |
| | | PFTFGSGTKLEIKRADAAPTVSIFPPSSEQLTSGGASVVCFLNNFYP | |
| | | KDINVKWKIDGSERQNGVLNSWTDQDSKDSTYSMSSTLTLTKDEYER | |
| | | HNSYTCEATHKTSTSPIVKSFNRNEC | |
| Ab193 | C8.3 VL | DVQMIQSPSSLSASLGDIVTMTCQASQGISINLNWFQQKPGKAPKLL | 1932 |
| | | IYGSSNLEDGVPSRFSGSRYGTDFTLTISSLEDEDMATYFCLQHSYL | |
| | | PFTFGSGTKLEIKRADAAPTVSIFPPSSEQLTSGGASVVCFLNNFYP | |
| | | KDINVKWKIDGSERQNGVLNSWTDQDSKDSTYSMSSTLTLTKDEYER | |
| | | HNSYTCEATHKISTSPIVKSFNRNEC | |
| Ab194 | D1.2 VL | DVMMTQTPLSLPVSLGDQASISCRSSQSLVHSNGNTYLHWHLQKPGQ | 1933 |
| | | SPKFLIYKVSNRFSGVPDRFSGSGSGTDFTLKISRVEAEDLGVYFCS | |
| | | QSTHVPFTFGSGTKLEIKRADAAPTVSIFPPSSEQLTSGGASVVCFL | |
| | | NNFYPKDINVKWKIDGSERQNGVLNSWTDQDSKDSTYSMSSTLTLTK | |
| | | DEYERHNSYTCEATHKTSTSPIVKSFNRNEC | |
| Ab195 | D1.2* VL | DVVMTQTPLSLPVSLGDQASISCRSSQSLVHSNGNTYLHWHLQKPGQ | 1934 |
| | | SPKFLIYKVSNRFSGVPDRFSGSGSGTDFTLKISRVEAEDLGVYFCS | |
| | | QSTHVPFTFGSGTKLEIKRADAAPTVSIFPPSSEQLTSGGASVVCFL | |
| | | NNFYPKDINVKWKIDGSERQNGVLNSWTDQDSKDSTYSMSSTLTLTK | |
| | | DEYERHNSYTCEATHKTSTSPIVKSENRNEC | |
| Ab196 | hC10.2 VL | DVQMTQSPSSLSASVGDRVTMTCQASQDTSINLNWFQQKPGKAPKLL | 1935 |
| | | IYGASNLETGVPSRFSGSRSGTDFTLTISSLQPEDMATYYCLQHTYL | |
| | | PFTFGSGTKLEIKRTVAAPSVFIFPPSDEQLKSGTASVVCLLNNFYP | |
| | | REAKVQWKVDNALQSGNSQESVTEQDSKDSTYSLSSTLTLSKADYEK | |
| | | HKVYACEVTHQGLSSPVTKSFNRGEC | |
| Ab197 | IPN001 VL- | gatgttttgatgacccaaactccgctctccctggcagtcaatcttgg | 1936 |
| | 336 | agatcaagcctccctctcttgcagatcgagtcagactattttacata | |
| | | gtaatggaaatacctatttagaatggtatttgcagaaaccaggccag | |
| | | tctccaagactcctgatctacaaagtttctaaacgattttctggggt | |
| | | cccagacaggttcagtggcagtggatcagggacagatttcacactca | |
| | | agatcagcagagtggaggctgacgatctgggaatttattactgcttt | |
| | | caaggttcacttgttccttgggcgttcggtggaggcaccaagctgga | |
| | | aatcaaa | |
| Ab198 | IPN001 VL | DVLMTQTPLSLAVNLGDQASLSCRSSQTILHSNGNTYLEWYLQKPGQ | 1937 |
| | | SPRLLIYKVSKRFSGVPDRFSGSGSGTDFTLKISRVEADDIGIYYCF | |
| | | QGSLVPWAFGGGTKLEIK | |
| Ab199 | IPN002 VL | DVXMTQSPLSLPVTLGQPASISC | 1938 |
| Ab200 | IPN002 VL- | gatgttttgatgacccaaactccactctccctgcctgtcagtcttgg | 1939 |
| | 336 | agatcaagcctccatctcttgcaaatctagtcagagcattgtacata | |
| | | gtaatggaaacacctatttagaatggtacctgcagaaaccaggccag | |
| | | tctccaaagctcctggtctacaaagtttccaatcgattttctggggt | |
| | | cccagacaggttcagtggcagtggatcagggacagatttcacactca | |
| | | agatcagcagagtggaggctgaggatctgggaacttattactgcttt | |
| | | caaggttcacttgttccttgggcgttcggtggaggcaccaagctgga | |
| | | aatcaaa | |
| Ab201 | IPN002 VL- | atgaagttgcctgttaggctgttggtgctgatgttctggattcctgc | 1940 |
| | 714 | ttccagcagtgatgttttgatgacccaaactccactctccctgcctg | |
| | | tcagtcttggagatcaagcctccatctcttgcaaatctagtcagagc | |
| | | attgtacatagtaatggaaacacctatttagaatggtacctgcagaa | |
| | | accaggccagtctccaaagctcctggtctacaaagtttccaatcgat | |
| | | tttctggggtcccagacaggttcagtggcagtggatcagggacagat | |
| | | ttcacactcaagatcagcagagtggaggctgaggatctgggaactta | |
| | | ttactgctttcaaggttcacttgttccttgggcgttcggtggaggca | |
| | | ccaagctggaaatcaaacgggctgatgctgcaccaactgtatccatc | |
| | | ttcccaccatccagtgagcagttaacatctggaggtgcctcagtcgt | |
| | | gtgcttcttgaacaacttctaccccaaagacatcaatgtcaagtgga | |
| | | agattgatggcagtgaacgacaaaatggcgtcctgaacagttggact | |
| | | gatcaggacagcaaagacagcacctacagcatgagcagcaccctcac | |
| | | gttgaccaaggacgagtatgaacgacataacagctatacctgtgagg | |
| | | ccactcacaagacatcaacttcacccattgtcaagagcttcaacagg | |
| | | aatgagtgt | |
| Ab202 | IPN002 VL- | DVLMTQTPLSLPVSLGDQASISCKSSQSIVHSNGNTYLEWYLQKPGQ | 1941 |
| | 112 | SPKLLVYKVSNRFSGVPDRFSGSGSGTDFTLKISRVEAEDLGTYYCF | |
| | | QGSLVPWAFGGGTKLEIK | |
| Ab203 | IPN002 VL | gatgttttgatgacccaaagcccactctccctgcctgtcacccttgg | 1942 |
| | variant 1 | acagcccgcctccatctcttgcaaatctagtcagagcattgtacata | |
| | | gtaatggaaacacctatttagaatggtacctgcagaaaccaggccag | |
| | | tctccacagctcctggtctacaaagtttccaatcgattttctggggt | |
| | | cccagacagattcagtggcagtggatcagggacagatttcacactca | |
| | | agatcagcagagtggaggctgaggatgtgggaacttattactgcttt | |
| | | caaggctcacttgttccttgggcgttcggtggaggcaccaaggtgga | |
| | | aatcaaa | |
| Ab204 | IPN002 VL | DVLMTQSPLSLPVTLGQPASISCKSSQSIVHSNGNTYLEWYLQKPGQ | 1943 |
| | variant 1 | SPQLLVYKVSNRFSGVPDRFSGSGSGTDFTLKISRVEAEDVGTYYCF | |
| | | QGSLVPWAFGGGTKVEIK | |
| Ab205 | IPN002 VL | gatgttgtgatgacccaaagcccactctccctgcctgtcacccttgg | 1944 |
| | variant 2 | acagcccgcctccatctcttgcaaatctagtcagagcattgtacata | |
| | | gtaatggaaacacctatttagaatggtacctgcagaaaccaggccag | |
| | | tctccacagctcctggtctacaaagtttccaatcgattttctggggt | |
| | | cccagacagattcagtggcagtggatcagggacagatttcacactca | |
| | | agatcagcagagtggaggctgaggatgtgggaacttattactgcttt | |
| | | caaggctcacttgttccttgggcgttcggtggaggcaccaaggtgga | |
| | | aatcaaa | |
| Ab206 | IPN002 VL | DVVMTQSPLSLPVTLGQPASISCKSSQSIVHSNGNTYLEWYLQKPGQ | 1945 |
| | variant 2 | SPQLLVYKVSNRFSGVPDRFSGSGSGTDFTLKISRVEAEDVGTYYCF | |
| | | QGSLVPWAFGGGTKVEIK | |
| Ab207 | IPN002 VL | gatgttgtgatgacccaaagcccactctccctgcctgtcacccttgg | 1946 |
| | variant 3 | acagcccgcctccatctcttgcaaatctagtcagagcattgtacata | |
| | | gtaatggaaacacctatttagaatggtacctgcagaaaccaggccag | |
| | | tctccacagctcctggtctacaaagtttccaatcgattttctggggt | |
| | | cccagacagattcagtggcagtggatcagggacagatttcacactca | |
| | | agatcagcagagtggaggctgaggatgtgggagtgtattactgcttt | |
| | | caaggctcacttgttccttgggcgttcggtggaggcaccaaggtgga | |
| | | aatcaaa | |
| Ab208 | IPN002 VL | DVVMTQSPLSLPVTLGQPASISCKSSQSIVHSNGNTYLEWYLQKPGQ | 1947 |
| | variant 3 | SPQLLVYKVSNRFSGVPDRFSGSGSGTDFTLKISRVEAEDVGVYYCF | |
| | | QGSLVPWAFGGGTKVEIK | |
| Ab209 | IPN002 VL | gatgttgtgatgacccaaagcccactctccctgcctgtcacccttgg | 1948 |
| | variant 4 | acagcccgcctccatctcttgcaaatctagtcagagcattgtacata | |
| | | gtaatggaaacacctatttagaatggtacctgcagaaaccaggccag | |
| | | tctccacagctcctgatctacaaagtttccaatcgattttctggggt | |
| | | cccagacagattcagtggcagtggatcagggacagatttcacactca | |
| | | agatcagcagagtggaggctgaggatgtgggagtgtattactgcttt | |
| | | caaggctcacttgttccttgggcgttcggtggaggcaccaaggtgga | |
| | | aatcaaa | |
| Ab210 | IPN002 VL | DVVMTQSPLSLPVTLGQPASISCKSSQSIVHSNGNTYLEWYLQKPGQ | 1949 |
| | variant 4 | SPQLLIYKVSNRFSGVPDRFSGSGSGTDFTLKISRVEAEDVGVYYCF | |
| | | QGSLVPWAFGGGTKVEIK | |
| Ab211 | MC1 VL- | atgaagttgcctgttaggctgttggtgctgatgttctggattcctgc | 1950 |
| | 714 | ttccagcagtgatgttgtgatgacccaaactccactctccctgcctg | |
| | | tcagtcttggagatcaagcctccatctcttgcagatctagtcagagc | |
| | | cttgtacacagtaatggaaacacctatttacattggtacctgcagaa | |
| | | gccaggccagtctccaaagctcctgatctacaaagtttccaaccgat | |
| | | tttctggggtcccagacaggttcagtggcagtggatcagggacagat | |
| | | ttcacactcaagatcagcagagtggaggctgaggatctgggagttta | |
| | | tttctgctctcaaagtacacatgttccgctcacgttcggtgctggga | |
| | | ccaagctggagctgaaacgggctgatgctgcaccaactgtatccatc | |
| | | ttcccaccatccagtgagcagttaacatctggaggtgcctcagtcgt | |
| | | gtgcttcttgaacaacttctaccccaaagacatcaatgtcaagtgga | |
| | | agattgatggcagtgaacgacaaaatggcgtcctgaacagttggact | |
| | | gatcaggacagcaaagacagcacctacagcatgagcagcaccctcac | |
| | | gttgaccaaggacgagtatgaacgacataacagctatacctgtgagg | |
| | | ccactcacaagacatcaacttcacccattgtcaagagcttcaacagg | |
| | | aatgagtgt | |
| Ab212 | MC1 VL- | atgaagttgcctgttaggctgttggtgctgatgttctggattcctgc | 1951 |
| | 717 | ttccagcagtgatgttgtgatgacccaaactccactctccctgcctg | |
| | | tcagtcttggagatcaagcctccatctcttgcagatctagtcagagc | |
| | | cttgtacacagtaatggaaacacctatttacattggtacctgcagaa | |
| | | gccaggccagtctccaaagctcctgatctacaaagtttccaaccgat | |
| | | tttctggggtcccagacaggttcagtggcagtggatcagggacagat | |
| | | ttcacactcaagatcagcagagtggaggctgaggatctgggagttta | |
| | | tttctgctctcaaagtacacatgttccgctcacgttcggtgctggga | |
| | | ccaagctggagctgaaacgggctgatgctgcaccaactgtatccatc | |
| | | ttcccaccatccagtgagcagttaacatctggaggtgcctcagtcgt | |
| | | gtgcttcttgaacaacttctaccccaaagacatcaatgtcaagtgga | |
| | | agattgatggcagtgaacgacaaaatggcgtcctgaacagttggact | |
| | | gatcaggacagcaaagacagcacctacagcatgagcagcaccctcac | |
| | | gttgaccaaggacgagtatgaacgacataacagctatacctgtgagg | |
| | | ccactcacaagacatcaacttcacccattgtcaagagcttcaacagg | |
| | | aatgagtgttag | |
| Ab213 | MC1 VL- | gaaattgtgttgacgcagtctccaggcaccctgtctttgtctccagg | 1952 |
| | 657 | ggaaagagccaccctctcctgcagatctagtcagagccttgtacaca | |
| | | gtaatcagaacacctatttacattggtaccagcagaaacctggccag | |
| | | gctcccaggctcctcatctataaagttgacaaccgattttctggcat | |
| | | cccagacaggttcagtggcagtgggtctgggacagacttcactctca | |
| | | ccatcagcagactggagcctgaagattttgcagtgtattactgttct | |
| | | caaagtacactggttccgctcacgttcggcggagggaccaaggtgga | |
| | | gatcaaacggaccgtggctgcaccatctgtcttcatcttcccgccat | |
| | | ctgatgagcagttgaaatctggaactgcctctgttgtgtgcctgctg | |
| | | aataacttctatcccagagaggccaaagtacagtggaaggtggataa | |
| | | cgccctccaatcgggtaactcccaggagagtgtcacagagcaggaca | |
| | | gcaaggacagcacctacagcctcagcagcaccctgacgctgagcaaa | |
| | | gcagactacgagaaacacaaagtctacgcctgcgaagtcacccatca | |
| | | gggcctgagctcgcccgtcacaaagagcttcaacaggggagagtgc | |
| Ab214 | MC1 VL- | MKLPVRLLVLMFWIPASSSDVVMTQTPLSLPVSLGDQASISCRSSQS | 1953 |
| | 238 | LVHSNGNTYLHWYLQKPGQSPKLLIYKVSNRFSGVPDRFSGSGSGTD | |
| | | FTLKISRVEAEDLGVYFCSQSTHVPLTFGAGTKLELKRADAAPTVSI | |
| | | FPPSSEQLTSGGASVVCFLNNFYPKDINVKWKIDGSERQNGVLNSWT | |
| | | DQDSKDSTYSMSSTLTLTKDEYERHNSYTCEATHKTSTSPIVKSENR | |
| | | NEC | |
| Ab215 | MC1 VL- | EIVLTQSPGILSLSPGERATLSCRSSQSLVHSNQNTYLHWYQQKPGQ | 1954 |
| | 219 | APRLLIYKVDNRFSGIPDRFSGSGSGIDFTLTISRLEPEDFAVYYCS | |
| | | QSTLVPLTFGGGTKVEIKRTVAAPSVFIFPPSDEQLKSGTASVVCLL | |
| | | NNFYPREAKVQWKVDNALQSGNSQESVTEQDSKDSTYSLSSTLTLSK | |
| | | ADYEKHKVYACEVTHQGLSSPVIKSENRGEC | |
| Ab216 | MC1 VL- | EIVLTQSPGTLSLSPGERATLSCRSSQSLVHSNQNTYLHWYQQKPGQ | 1955 |
| | 112 | APRLLIYKVDNRFSGIPDRFSGSGSGTDFTLTISRLEPEDFAVYYCS | |
| | | QSTLVPLTFGGGTKVEIK | |
| Ab217 | PHF1 VL- | gatgttgtgatgacccagactccactcactttgtcggttaccattgg | 1956 |
| | 339v1 | acaaccagcctccatctcttgcaagtcaagtcagagcctcttagata | |
| | | gtgatggaaagacatatttgaattggttgttacagaggccaggccag | |
| | | tctccaaagcgcctaatctatctggtgtctaaactggactctggagt | |
| | | ccccgacagattcactggcagtggatcagggacagatttcacactga | |
| | | aaattagcagagtggaggctgaggatttgggagtttattattgctgg | |
| | | caaggtacacattttcctcggacgttcggtggaggcaccaagctgga | |
| | | aatcaaacgg | |
| Ab218 | PHF1 VL- | gatgttgtgatgacccagactccactcactttgtcggttaccattgg | 1957 |
| | 339v2 | acaaccagcctccatctcttgcaagtcaagtcagagcctcttagata | |
| | | gtgatggaaagacatatttgaattggttgttacagaggccaggccag | |
| | | tctccaaagcgcctaatctatctggtgtctaaactggactctggagt | |
| | | ccctgacagattcactggcagtggatcagggacagatttcacactga | |
| | | aaattagcagagtggaggctgaggatttgggagtttattattgctgg | |
| | | caaggtacacattttcctcggacgttcggtggaggcaccaagctgga | |
| | | aatcaaacgg | |
| Ab219 | PHF1 VL- | atgagtcctgcccagttcctgtttctgttagtgctctggattcggga | 1958 |
| | 396 | aaccaacggtgatgttgtgatgacccagactccactcactttgtcgg | |
| | | ttaccattggacaaccagcctccatctcttgcaagtcaagtcagagc | |
| | | ctcttagatagtgatggaaagacatatttgaattggttgttacagag | |
| | | gccaggccagtctccaaagcgcctaatctatctggtgtctaaactgg | |
| | | actctggagtccccgacagattcactggcagtggatcagggacagat | |
| | | ttcacactgaaaattagcagagtggaggctgaggatttgggagttta | |
| | | ttattgctggcaaggtacacattttcctcggacgttcggtggaggca | |
| | | ccaagctggaaatcaaacgg | |
| Ab220 | PHF1 VL- | gatgttgtgatgacccagactccactcactttgtcggttaccattgg | 1959 |
| | 657 | acaaccagcctccatctcttgcaagtcaagtcagagcctcttagata | |
| | | gtgatggaaagacatatttgaattggttgttacagaggccaggccag | |
| | | tctccaaagcgcctaatctatctggtgtctaaactggactctggagt | |
| | | ccctgacagattcactggcagtggatcagggacagatttcacactga | |
| | | aaattagcagagtggaggctgaggatttgggagtttattattgctgg | |
| | | caaggtacacattttcctcggacgttcggtggaggcaccaagctgga | |
| | | aatcaaacgggctgatgctgcaccaactgtatccatcttcccaccat | |
| | | ccagtgagcagttaacatctggaggtgcctcagtcgtgtgcttcttg | |
| | | aacaacttctaccccaaagacatcaatgtcaagtggaagattgatgg | |
| | | cagtgaacgacaaaatggcgtcctgaacagttggactgatcaggaca | |
| | | gcaaagacagcacctacagcatgagcagcaccctcacgttgaccaag | |
| | | gacgagtatgaacgacataacagctatacctgtgaggccactcacaa | |
| | | gacatcaacttcacccattgtcaagagcttcaacaggaatgagtgt | |
| Ab221 | PHF1 VL- | gatgttgtgatgacccagactccactcactttgtcggttaccattgg | 1960 |
| | 660 | acaaccagcctccatctcttgcaagtcaagtcagagcctcttagata | |
| | | gtgatggaaagacatatttgaattggttgttacagaggccaggccag | |
| | | tctccaaagcgcctaatctatctggtgtctaaactggactctggagt | |
| | | ccctgacagattcactggcagtggatcagggacagatttcacactga | |
| | | aaattagcagagtggaggctgaggatttgggagtttattattgctgg | |
| | | caaggtacacattttcctcggacgttcggtggaggcaccaagctgga | |
| | | aatcaaacgggctgatgctgcaccaactgtatccatcttcccaccat | |
| | | ccagtgagcagttaacatctggaggtgcctcagtcgtgtgcttcttg | |
| | | aacaacttctaccccaaagacatcaatgtcaagtggaagattgatgg | |
| | | cagtgaacgacaaaatggcgtcctgaacagttggactgatcaggaca | |
| | | gcaaagacagcacctacagcatgagcagcaccctcacgttgaccaag | |
| | | gacgagtatgaacgacataacagctatacctgtgaggccactcacaa | |
| | | gacatcaacttcacccattgtcaagagcttcaacaggaatgagtgtt | |
| | | ag | |
| Ab222 | PHF1 VL- | gatgttgtgatgacccagactccactcactttgtcggttaccattgg | 1961 |
| | 678 | acaaccagcctccatctcttgcaagtcaagtcagagcctcttagata | |
| | | gtgatggaaagacatatttgaattggttgttacagaggccaggccag | |
| | | tctccaaagcgcctaatctatctggtgtctaaactggactctggagt | |
| | | ccctgacagattcactggcagtggatcagggacagatttcacactga | |
| | | aaattagcagagtggaggctgaggatttgggagtttattattgctgg | |
| | | caaggtacacattttcctcggacgttcggtggaggcaccaagctgga | |
| | | aatcaaacgggctgatgctgcaccaactgtatccatcttcccaccat | |
| | | ccagtgagcagttaacatctggaggtgcctcagtcgtgtgcttcttg | |
| | | aacaacttctaccccaaagacatcaatgtcaagtggaagattgatgg | |
| | | cagtgaacgacaaaatggcgtcctgaacagttggactgatcaggaca | |
| | | gcaaagacagcacctacagcatgagcagcaccctcacgttgaccaag | |
| | | gacgagtatgaacgacataacagctatacctgtgaggccactcacaa | |
| | | gacatcaacttcacccattgtcaagagcttcaacaggaatgagtgta | |
| | | gcgagaaggacgagctgtag | |
| Ab223 | PHF1 VL- | atgagtcctgcccagttcctgtttctgttagtgctctggattcggga | 1962 |
| | 714 | aaccaacggtgatgttgtgatgacccagactccactcactttgtcgg | |
| | | ttaccattggacaaccagcctccatctcttgcaagtcaagtcagagc | |
| | | ctcttagatagtgatggaaagacatatttgaattggttgttacagag | |
| | | gccaggccagtctccaaagcgcctaatctatctggtgtctaaactgg | |
| | | actctggagtccctgacagattcactggcagtggatcagggacagat | |
| | | ttcacactgaaaattagcagagtggaggctgaggatttgggagttta | |
| | | ttattgctggcaaggtacacattttcctcggacgttcggtggaggca | |
| | | ccaagctggaaatcaaacgggctgatgctgcaccaactgtatccatc | |
| | | ttcccaccatccagtgagcagttaacatctggaggtgcctcagtcgt | |
| | | gtgcttcttgaacaacttctaccccaaagacatcaatgtcaagtgga | |
| | | agattgatggcagtgaacgacaaaatggcgtcctgaacagttggact | |
| | | gatcaggacagcaaagacagcacctacagcatgagcagcaccctcac | |
| | | gttgaccaaggacgagtatgaacgacataacagctatacctgtgagg | |
| | | ccactcacaagacatcaacttcacccattgtcaagagcttcaacagg | |
| | | aatgagtgt | |
| Ab224 | PHF1 VL- | atgatgagtcctgcccagttcctgtttctgttagtgctctggattcg | 1963 |
| | 720 | ggaaaccaacggtgatgttgtgatgacccagactccactcactttgt | |
| | | cggttaccattggacaaccagcctccatctcttgcaagtcaagtcag | |
| | | agcctcttagatagtgatggaaagacatatttgaattggttgttaca | |
| | | gaggccaggccagtctccaaagcgcctaatctatctggtgtctaaac | |
| | | tggactctggagtccctgacagattcactggcagtggatcagggaca | |
| | | gatttcacactgaaaattagcagagtggaggctgaggatttgggagt | |
| | | ttattattgctggcaaggtacacattttcctcggacgttcggtggag | |
| | | gcaccaagctggaaatcaaacgggctgatgctgcaccaactgtatcc | |
| | | atcttcccaccatccagtgagcagttaacatctggaggtgcctcagt | |
| | | cgtgtgcttcttgaacaacttctaccccaaagacatcaatgtcaagt | |
| | | ggaagattgatggcagtgaacgacaaaatggcgtcctgaacagttgg | |
| | | actgatcaggacagcaaagacagcacctacagcatgagcagcaccct | |
| | | cacgttgaccaaggacgagtatgaacgacataacagctatacctgtg | |
| | | aggccactcacaagacatcaacttcacccattgtcaagagcttcaac | |
| | | aggaatgagtgttag | |
| Ab225 | PHF1 VL- | MMSPAQFLFLLVLWIRETNGDVVMTQTPLTLSVTIGQPASISCKSSQ | 1964 |
| | 239 | SLLDSDGKTYLNWLLQRPGQSPKRLIYLVSKLDSGVPDRFTGSGSGT | |
| | | DFTLKISRVEAEDLGVYYCWQGTHFPRTFGGGTKLEIKRADAAPTVS | |
| | | IFPPSSEQLTSGGASVVCFLNNFYPKDINVKWKIDGSERQNGVLNSW | |
| | | TDQDSKDSTYSMSSTLTLTKDEYERHNSYTCEATHKISTSPIVKSEN | |
| | | RNEC | |
| Ab226 | PHF1 VL + | gccgccaccatgggatggagctggatctttctctttctcctgtcagg | 1965 |
| | (732) | aactacaggtgtcctctctgctgccgatgttgtgatgacccagactc | |
| | | cactcactttgtcggttaccattggacaaccagcctccatctcttgc | |
| | | aagtcaagtcagagcctcttagatagtgatggaaagacatatttgaa | |
| | | ttggttgttacagaggccaggccagtctccaaagcgcctaatctatc | |
| | | tggtgtctaaactggactctggagtccctgacagattcactggcagt | |
| | | ggatcagggacagatttcacactgaaaattagcagagtggaggctga | |
| | | ggatttgggagtttattattgctggcaaggtacacattttcctcgga | |
| | | cgttcggtggaggcaccaagctggaaatcaaacgggctgatgctgca | |
| | | ccaactgtatccatcttcccaccatccagtgagcagttaacatctgg | |
| | | aggtgcctcagtcgtgtgcttcttgaacaacttctaccccaaagaca | |
| | | tcaatgtcaagtggaagattgatggcagtgaacgacaaaatggcgtc | |
| | | ctgaacagttggactgatcaggacagcaaagacagcacctacagcat | |
| | | gagcagcaccctcacgttgaccaaggacgagtatgaacgacataaca | |
| | | gctatacctgtgaggccactcacaagacatcaacttcacccattgtc | |
| | | aagagcttcaacaggaatgagtgttag | |
| Ab227 | PHF1 VL + | atgatgagtcctgcccagttcctgtttctgttagtgctctggattcg | 1966 |
| | (747) | ggaaaccaacggtgatgttgtgatgacccagactccactcactttgt | |
| | | cggttaccattggacaaccagcctccatctcttgcaagtcaagtcag | |
| | | agcctcttagatagtgatggaaagacatatttgaattggttgttaca | |
| | | gaggccaggccagtctccaaagcgcctaatctatctggtgtctaaac | |
| | | tggactctggagtccctgacagattcactggcagtggatcagggaca | |
| | | gatttcacactgaaaattagcagagtggaggctgaggatttgggagt | |
| | | ttattattgctggcaaggtacacattttcctcggacgttcggtggag | |
| | | gcaccaagctggaaatcaaacgggctgatgctgcaccaactgtatcc | |
| | | atcttcccaccatccagtgagcagttaacatctggaggtgcctcagt | |
| | | cgtgtgcttcttgaacaacttctaccccaaagacatcaatgtcaagt | |
| | | ggaagattgatggcagtgaacgacaaaatggcgtcctgaacagttgg | |
| | | actgatcaggacagcaaagacagcacctacagcatgagcagcaccct | |
| | | cacgttgaccaaggacgagtatgaacgacataacagctatacctgtg | |
| | | aggccactcacaagacatcaacttcacccattgtcaagagcttcaac | |
| | | aggaatgagtgttacccatacgatgttccagattacgcttag | |
| Ab228 | PT1 VL- | gatattgtgatgactcaggctgcaccctctgtacctgtcactcctgg | 1967 |
| | 336 | agagtcagtttccatctcctgcaggtctagtgagagtctcctgcata | |
| | | gtaatggcaacacttacttgtattggttcctgcagaggccaggccag | |
| | | tctcctcagctcctgatatatcggatgtccaaccttgcctcaggagt | |
| | | cccagacaggttcagtggcagtgggtcaggaactgctttcacactga | |
| | | gaatcagtagagtggaggctgaggatgtgggtgtttattactgtatg | |
| | | caatatctagaatatccgctcacgttcggtgctgggaccaagctgga | |
| | | gctgaaa | |
| Ab229 | PT1 VL- | DIVMTQAAPSVPVTPGESVSISCRSSESLLHSNGNTYLYWFLQRPGQ | 1968 |
| | 112 | SPQLLIYRMSNLASGVPDRFSGSGSGTAFTLRISRVEAEDVGVYYCM | |
| | | QYLEYPLTFGAGTKLELK | |
| Ab230 | PT3 VL- | gacatcaagatgacccagtctccatcttccatgtatgcatctctagg | 1969 |
| | 321 | agagagagtcactatcacttgcaaggcgagtcaggacattaataggt | |
| | | atttaaactggttccagcagaaaccagggaaatctcctaagaccctg | |
| | | atctatcgtgcaaacagattgctagatggggtcccatcaaggttcag | |
| | | tggcagtggatctgggcaagattactctctcaccatcagcagcctgg | |
| | | attatgaagatatgggaatttattattgtctacagtatgatgagttt | |
| | | ccgctcacgttcggtgatgggaccaagctggagctgaaa | |
| Ab231 | PT3 VL- | DIKMTQSPSSMYASLGERVTITCKASQDINRYLNWFQQKPGKSPKTL | 1970 |
| | 107 | IYRANRLLDGVPSRFSGSGSGQDYSLTISSLDYEDMGIYYCLQYDEF | |
| | | PLTFGDGTKLELK | |
| Ab232 | PT3 VL | gatattaaaatgacccagagcccgagcagcatgtatgcgagcctggg | 1971 |
| | Bioinformatics | cgaacgcgtgaccattacctgcaaagcgagccaggatattaaccgct | |
| | | atctgaactggtttcagcagaaaccgggcaaaagcccgaaaaccctg | |
| | | atttatcgcgcgaaccgcctgctggatggcgtgccgagccgctttag | |
| | | cggcagcggcagcggccaggattatagcctgaccattagcagcctgg | |
| | | attatgaagatatgggcatttattattgcctgcagtatgatgaattt | |
| | | ccgctgacctttggcgatggcaccaaactggaactgaaa | |
| Ab233 | PT3 VL | gatatcaagatgacccagagccccagctccatgtatgccagcctggg | 1972 |
| | Bioinformatics | ggagcgggtgaccatcacctgcaaggcctcccaggacatcaaccgct | |
| | 2 | acctgaactggttccagcagaagccaggcaagtcccccaagaccctc | |
| | | atctatcgggccaaccggctgctggatggagtgccctcccgcttctc | |
| | | cggcagtggcagcggccaggattacagcctcaccatttcttccctgg | |
| | | actatgaggacatgggcatctactactgcctgcagtatgatgagttc | |
| | | cccctgacctttggagatggcaccaagctggagctgaag | |
| Ab234 | PT3 VL | gacatcaagatgacccagagccccagcagcatgtacgccagcctggg | 1973 |
| | EMBOSS | cgagagggtgaccatcacctgcaaggccagccaggacatcaacaggt | |
| | | acctgaactggttccagcagaagcccggcaagagccccaagaccctg | |
| | | atctacagggccaacaggctgctggacggcgtgcccagcaggttcag | |
| | | cggcagcggcagcggccaggactacagcctgaccatcagcagcctgg | |
| | | actacgaggacatgggcatctactactgcctgcagtacgacgagttc | |
| | | cccctgaccttcggcgacggcaccaagctggagctgaag | |
| Ab235 | PT3 VL | gacatcaagatgacccagagcccttcctccatgtatgcctccctggg | 1974 |
| | Geneinfinity | ggagcgggtgaccatcacctgcaaggccagccaggatatcaaccgct | |
| | | acctgaactggttccagcagaagccaggcaagagccccaagaccctc | |
| | | atctatcgggccaaccggctgctggatggagtgcccagccgcttctc | |
| | | cggcagcggcagtggccaggactacagcctcaccatttccagcctgg | |
| | | actatgaggacatgggcatctactactgcctgcagtatgatgagttc | |
| | | cccctgacctttggagatggcaccaagctggagctgaag | |
| Ab236 | PT3 VL | gacatcaagatgacccagtcccccagctccatgtacgcctctctggg | 1975 |
| | Genescript | agagcgggtgaccatcacatgcaaggcttctcaggatatcaaccgct | |
| | | acctgaactggttccagcagaagcccggaaagagccctaagaccctg | |
| | | atctacagggccaacagactgctggacggcgtgccaagcaggttttc | |
| | | cggctctggaagcggccaggattactccctgacaatctctagcctgg | |
| | | actacgaggatatgggcatctactactgtctgcagtacgacgagttc | |
| | | cccctgacctttggagatggcacaaagctggagctgaag | |
| Ab237 | PT3 VL | gacatcaagatgacccagagcccttcctccatgtatgcctccctggg | 1976 |
| | IDT | ggagcgggtgaccatcacctgcaaggccagccaggatatcaaccgct | |
| | | acctgaactggttccagcagaagcccggcaagagccccaagaccctc | |
| | | atctatcgggccaaccggctgctggatggagtgcccagccgcttctc | |
| | | cggcagcggcagtggccaggactacagcctgaccatttcttctctgg | |
| | | actatgaggacatgggcatctactactgcctgcagtatgatgagttc | |
| | | cccctgacatttggagatggcaccaagctggagctgaag | |
| Ab238 | PT3 VL | cgggctgatgctgcaccaactgtatccatcttcccaccatccagtga | 1977 |
| | NUS | gcagttaacatctggaggtgcctcagtcgtgtgcttcttgaacaact | |
| | | tctaccccaaagacatcaatgtcaagtggaagattgatggcagtgaa | |
| | | cgacaaaatgacatcaagatgacccagagcccttcctccatgtatgc | |
| | | ctccctgggggagcgggtgacaatcacctgcaaggccagccaggata | |
| | | tcaaccgctacctgaactggttccagcagaagccaggcaagagcccc | |
| | | aagaccctcatctatagagccaaccggctgctggacggc | |
| Ab239 | PT3 VL | gacatcaagatgacccagagcccttcttccatgtatgcttctttagg | 1978 |
| | NUS2 | agaaagagtgacaatcacctgcaaggccagccaggatatcaaccgct | |
| | | acctgaactggttccagcagaagccaggaaaatctcccaagaccctg | |
| | | atttatagagccaacagactgctggacggcgtgcccagccgcttcag | |
| | | tggatctggaagtggccaggactacagcctgaccatctcttctctgg | |
| | | attatgaagacatgggcatctactactgcctgcagtatgatgaattt | |
| | | cctttaacatttggagatggcaccaagctggagctgaag | |
| Ab240 | PT3 VL | gatatcaagatgacccagagcccttcctccatgtatgcctccctggg | 1979 |
| | NUS3 | ggagcgggtgaccatcacctgcaaggccagccaggacatcaaccgct | |
| | | acctgaactggttccagcagaagcccggcaagagccccaagaccctc | |
| | | atctatcgggccaaccggctgctggatggagtgcccagccgcttctc | |
| | | cggcagcggcagtggccaggattacagcctcaccatttccagcctgg | |
| | | actatgaggacatgggcatctactactgcctgcagtatgatgagttc | |
| | | cccctgacctttggagatggcaccaagctggagctgaag | |
| Ab241 | PT3 VL | gacatcaagatgacccagagccctagcagcatgtacgccagcctggg | 1980 |
| | Snapgene | cgagagagtgaccatcacctgcaaggccagccaggacatcaacagat | |
| | | acctgaactggttccagcagaagcctggcaagagccctaagaccctg | |
| | | atctacagagccaacagactgctggacggcgtgcctagcagattcag | |
| | | cggcagcggcagcggccaggactacagcctgaccatcagcagcctgg | |
| | | actacgaggacatgggcatctactactgcctgcagtacgacgagttc | |
| | | cctctgaccttcggcgacggcaccaagctggagctgaag | |
| Ab242 | VL | DVLMTQSPLSLPVTLGQPASISC | 1981 |
| Ab243 | AT8 Fab1 | RSGYSSPGXPGXPGSRSR | 1982 |
| Ab244 | AT8 Fab2 | RSGYSSPGXPGXPGXRSR | 1983 |
| Ab245 | MC-1 | gaggagccaccatggaatggacctgggtctttctcttcctcctgtca | 1984 |
| | Furin 2A- | gtaactgcaggtgtccactcccaggttcagctgcagcagtctggagc | |
| | 2168 | tgagctgatgaagcctggggcctcagtgaagatatcctgcaaggcta | |
| | | ctggctacacattcagtaactactggatagagtgggtaaagcagagg | |
| | | cctggacatggccttgagtggattggagagattttacctggaagtga | |
| | | tagtattaagtacaatgagaatttcaagggcaaggccacattcactg | |
| | | cagatacatcctccaacacagcctacatgcaactcagcagcctgaca | |
| | | tctgaggactctgccgtctattactgtgcaagaagggggaactaccc | |
| | | agactactggggccaaggcaccactctcacagtctcctcagccaaaa | |
| | | cgacacccccatctgtctatccactggcccctggatctgctgcccaa | |
| | | actaactccatggtgaccctgggatgcctggtcaagggctatttccc | |
| | | tgagccagtgacagtgacctggaactctggatccctgtccagcggtg | |
| | | tgcacaccttcccagctgtcctgcagtctgacctctacactctgagc | |
| | | agctcagtgactgtcccctccagcacctggcccagcgagaccgtcac | |
| | | ctgcaacgttgcccacccggccagcagcaccaaggtggacaagaaaa | |
| | | ttgtgcccagggattgtggttgtaagccttgcatatgtacagtccca | |
| | | gaagtatcatctgtcttcatcttccccccaaagcccaaggatgtgct | |
| | | caccattactctgactcctaaggtcacgtgtgttgtggtagacatca | |
| | | gcaaggatgatcccgaggtccagttcagctggtttgtagatgatgtg | |
| | | gaggtgcacacagctcagacgcaaccccgggaggagcagttcaacag | |
| | | cactttccgctcagtcagtgaacttcccatcatgcaccaggactggc | |
| | | tcaatggcaaggagttcaaatgcagggtcaacagtgcagctttccct | |
| | | gcccccatcgagaaaaccatctccaaaaccaaaggcagaccgaaggc | |
| | | tccacaggtgtacaccattccacctcccaaggagcagatggccaagg | |
| | | ataaagtcagtctgacctgcatgataacagacttcttccctgaagac | |
| | | attactgtggagtggcagtggaatgggcagccagcggagaactacaa | |
| | | gaacactcagcccatcatggacacagatggctcttacttcgtctaca | |
| | | gcaagctcaatgtgcagaagagcaactgggaggcaggaaatactttc | |
| | | acctgctctgtgttacatgagggcctgcacaaccaccatactgagaa | |
| | | gagcctctcccactctcctggtagaaagaggcgagagggcagaggaa | |
| | | gtcttctaacatgcggtgacgtggaggagaatcccggccctatgaag | |
| | | ttgcctgttaggctgttggtgctgatgttctggattcctgcttccag | |
| | | cagtgatgttgtgatgacccaaactccactctccctgcctgtcagtc | |
| | | ttggagatcaagcctccatctcttgcagatctagtcagagccttgta | |
| | | cacagtaatggaaacacctatttacattggtacctgcagaagccagg | |
| | | ccagtctccaaagctcctgatctacaaagtttccaaccgattttctg | |
| | | gggtcccagacaggttcagtggcagtggatcagggacagatttcaca | |
| | | ctcaagatcagcagagtggaggctgaggatctgggagtttatttctg | |
| | | ctctcaaagtacacatgttccgctcacgttcggtgctgggaccaagc | |
| | | tggagctgaaacgggctgatgctgcaccaactgtatccatcttccca | |
| | | ccatccagtgagcagttaacatctggaggtgcctcagtcgtgtgctt | |
| | | cttgaacaacttctaccccaaagacatcaatgtcaagtggaagattg | |
| | | atggcagtgaacgacaaaatggcgtcctgaacagttggactgatcag | |
| | | gacagcaaagacagcacctacagcatgagcagcaccctcacgttgac | |
| | | caaggacgagtatgaacgacataacagctatacctgtgaggccactc | |
| | | acaagacatcaacttcacccattgtcaagagcttcaacaggaatgag | |
| | | tgttag | |
| Ab246 | MC-1 | MEWTWVFLFLLSVTAGVHSQVQLQQSGAELMKPGASVKISCKATGYT | 1985 |
| | Furin 2A- | FSNYWIEWVKQRPGHGLEWIGEILPGSDSIKYNENFKGKATFTADTS | |
| | 718 | SNTAYMQLSSLTSEDSAVYYCARRGNYPDYWGQGTTLTVSSAKTTPP | |
| | | SVYPLAPGSAAQTNSMVTLGCLVKGYFPEPVTVTWNSGSLSSGVHIF | |
| | | PAVLQSDLYTLSSSVTVPSSTWPSETVTCNVAHPASSTKVDKKIVPR | |
| | | DCGCKPCICTVPEVSSVFIFPPKPKDVLTITLTPKVTCVVVDISKDD | |
| | | PEVQFSWFVDDVEVHTAQTQPREEQFNSTFRSVSELPIMHQDWLNGK | |
| | | EFKCRVNSAAFPAPIEKTISKTKGRPKAPQVYTIPPPKEQMAKDKVS | |
| | | LTCMITDFFPEDITVEWQWNGQPAENYKNTQPIMDTDGSYFVYSKLN | |
| | | VQKSNWEAGNTFTCSVLHEGLHNHHTEKSLSHSPGRKRREGRGSLLT | |
| | | CGDVEENPGPMKLPVRLLVLMFWIPASSSDVVMTQTPLSLPVSLGDQ | |
| | | ASISCRSSQSLVHSNGNTYLHWYLQKPGQSPKLLIYKVSNRFSGVPD | |
| | | RFSGSGSGTDFTLKISRVEAEDLGVYFCSQSTHVPLTFGAGTKLELK | |
| | | RADAAPTVSIFPPSSEQLISGGASVVCFLNNFYPKDINVKWKIDGSE | |
| | | RQNGVLNSWTDQDSKDSTYSMSSTLTLTKDEYERHNSYTCEATHKTS | |
| | | TSPIVKSFNRNEC | |
| Ab247 | MC-1 | gaggagccaccatggagtggacctgggtgttcctgttcctgctgagc | 1986 |
| | optimized | gtgaccgccggcgtgcactcccaagtccagctgcagcagagcggcgc | |
| | seq | cgagctgatgaagcccggcgccagcgtgaagatcagctgcaaggcca | |
| | | ccggctacaccttcagcaactactggatcgagtgggtgaagcagcgg | |
| | | cccggccacggcctggagtggatcggcgagatcctgcccggcagcga | |
| | | cagcatcaagtacaacgagaacttcaagggcaaggccaccttcaccg | |
| | | ccgacaccagcagcaacaccgcctacatgcagctgagcagcctgacc | |
| | | agcgaggacagcgccgtgtactactgcgcccggcggggcaactaccc | |
| | | cgactactggggccagggcaccaccctgaccgtctccagcgccaaga | |
| | | ccacaccacccagcgtgtacccactggctccaggcagcgctgcccag | |
| | | accaacagcatggtgaccctgggctgcctggtgaagggctacttccc | |
| | | cgagcccgtgaccgtgacctggaacagcggcagcctgagcagcggcg | |
| | | tgcacaccttcccagccgtgctccaaagcgacctgtacacactgagc | |
| | | agcagcgtgaccgtgcccagcagcacctggcccagcgagaccgtgac | |
| | | ctgcaacgtggcccaccccgccagcagcaccaaggtggacaagaaga | |
| | | tcgtgccccgggactgcggctgcaagccctgcatctgcaccgtgccc | |
| | | gaagtcagcagcgtgttcatcttcccacccaagcccaaggacgtgct | |
| | | gaccatcaccctgacacccaaagtcacctgcgtggtggtggacatca | |
| | | gcaaggacgaccccgaggtgcagttcagctggttcgtggacgacgtg | |
| | | gaggtgcacaccgcccagacccagccccgggaggagcagttcaacag | |
| | | caccttccggagcgtgagcgagctgcccatcatgcaccaggactggc | |
| | | tgaacggcaaggagttcaagtgccgggtgaacagcgccgccttcccc | |
| | | gcccccatcgagaagaccatcagcaagaccaagggacggcccaaggc | |
| | | tccccaggtgtacaccatcccaccacccaaggagcagatggccaagg | |
| | | acaaagtcagcctgacctgcatgatcaccgacttcttccccgaggac | |
| | | atcaccgtggagtggcagtggaacggccagcccgccgagaactacaa | |
| | | gaacacccagcccatcatggacaccgacggcagctacttcgtgtaca | |
| | | gcaagctgaacgtgcagaagagcaactgggaggccggcaacaccttc | |
| | | acctgcagcgtgctgcacgagggcctgcacaaccatcacaccgagaa | |
| | | gagcctgagccacagcccaggacggaagcgccgcgagggcaggggca | |
| | | gcctgctgacctgcggcgacgtggaggagaacccaggccccatgaag | |
| | | ctgcccgtgcggctgctggtgctgatgttctggatccccgccagcag | |
| | | cagcgacgtggtgatgacccagaccccactgagcctgcccgtgagcc | |
| | | tgggcgaccaggccagcatcagctgccggagcagccagagcctggtg | |
| | | cacagcaacggcaacacctacctgcactggtacctgcagaagcccgg | |
| | | ccagagccccaagctgctgatctacaaagtcagcaaccggttcagcg | |
| | | gcgtgcccgaccggttcagcggcagcggcagcggcaccgacttcacc | |
| | | ctgaagatcagccgggtggaggccgaggacctgggcgtgtacttctg | |
| | | cagccagagcacccacgtgcccctgaccttcggcgccggcaccaagc | |
| | | tggagctgaagcgggccgacgccgctcccaccgtcagcatcttccca | |
| | | ccctcctccgagcagctgaccagcggaggcgccagcgtggtgtgctt | |
| | | cctgaacaacttctaccccaaggacatcaacgtgaagtggaagatcg | |
| | | acggcagcgagcggcagaacggcgtgctgaacagctggaccgaccag | |
| | | gacagcaaggacagcacctacagcatgagcagcaccctgaccctgac | |
| | | caaggacgagtacgagcggcacaacagctacacctgcgaggccaccc | |
| | | acaagaccagcaccagccccatcgtgaagagcttcaaccggaacgag | |
| | | tgctga | |
| Ab248 | PHF-1 | gaggagccaccatgggatggagctggatctttctctttctcctgtca | 1987 |
| | Furin 2A- | ggaactacaggtgtcctctctgaggtccagctgcaacagtctggacc | |
| | 2174 | tgagctggtgaagcctggggcttcagtgaagatatcctgcaagactt | |
| | | ctggatacacattcactgaatacaccatacactgggtgaagcagagc | |
| | | catggagagagccttgagtggattggaggtattaatccaaacgatgg | |
| | | tggtactatttacaaccagaagttcaagggcaaggccacattgactg | |
| | | tagacaagtcctccaaaacagcctacatggagctccgcagcctgaca | |
| | | tctgaggattctgcagtcttttactgtgcaagagggccctccgccag | |
| | | gtttccttactggggccaagggactctggtcactgtctctgcagcca | |
| | | aaacgacacccccatctgtctatccactggcccctggatctgctgcc | |
| | | caaactaactccatggtgaccctgggatgcctggtcaagggctattt | |
| | | ccctgagccagtgacagtgacctggaactctggatccctgtccagcg | |
| | | gtgtgcacaccttcccagctgtcctgcagtctgacctctacactctg | |
| | | agcagctcagtgactgtcccctccagcacctggcccagcgagaccgt | |
| | | cacctgcaacgttgcccacccggccagcagcaccaaggtggacaaga | |
| | | aaattgtgcccagggattgtggttgtaagccttgcatatgtacagtc | |
| | | ccagaagtatcatctgtcttcatcttccccccaaagcccaaggatgt | |
| | | gctcaccattactctgactcctaaggtcacgtgtgttgtggtagaca | |
| | | tcagcaaggatgatcccgaggtccagttcagctggtttgtagatgat | |
| | | gtggaggtgcacacagctcagacgcaaccccgggaggagcagttcaa | |
| | | cagcactttccgctcagtcagtgaacttcccatcatgcaccaggact | |
| | | ggctcaatggcaaggagttcaaatgcagggtcaacagtgcagctttc | |
| | | cctgcccccatcgagaaaaccatctccaaaaccaaaggcagaccgaa | |
| | | ggctccacaggtgtacaccattccacctcccaaggagcagatggcca | |
| | | aggataaagtcagtctgacctgcatgataacagacttcttccctgaa | |
| | | gacattactgtggagtggcagtggaatgggcagccagcggagaacta | |
| | | caagaacactcagcccatcatggacacagatggctcttacttcgtct | |
| | | acagcaagctcaatgtgcagaagagcaactgggaggcaggaaatact | |
| | | ttcacctgctctgtgttacatgagggcctgcacaaccaccatactga | |
| | | gaagagcctctcccactctcctggtagaaagaggcgagagggcagag | |
| | | gaagtcttctaacatgcggtgacgtggaggagaatcccggccctatg | |
| | | atgagtcctgcccagttcctgtttctgttagtgctctggattcggga | |
| | | aaccaacggtgatgttgtgatgacccagactccactcactttgtcgg | |
| | | ttaccattggacaaccagcctccatctcttgcaagtcaagtcagagc | |
| | | ctcttagatagtgatggaaagacatatttgaattggttgttacagag | |
| | | gccaggccagtctccaaagcgcctaatctatctggtgtctaaactgg | |
| | | actctggagtccctgacagattcactggcagtggatcagggacagat | |
| | | ttcacactgaaaattagcagagtggaggctgaggatttgggagttta | |
| | | ttattgctggcaaggtacacattttcctcggacgttcggtggaggca | |
| | | ccaagctggaaatcaaacgggctgatgctgcaccaactgtatccatc | |
| | | ttcccaccatccagtgagcagttaacatctggaggtgcctcagtcgt | |
| | | gtgcttcttgaacaacttctaccccaaagacatcaatgtcaagtgga | |
| | | agattgatggcagtgaacgacaaaatggcgtcctgaacagttggact | |
| | | gatcaggacagcaaagacagcacctacagcatgagcagcaccctcac | |
| | | gttgaccaaggacgagtatgaacgacataacagctatacctgtgagg | |
| | | ccactcacaagacatcaacttcacccattgtcaagagcttcaacagg | |
| | | aatgagtgttag | |
| Ab249 | PHF-1 | MGWSWIFLFLLSGTTGVLSEVQLQQSGPELVKPGASVKISCKTSGYT | 1988 |
| | Furin 2A- | FTEYTIHWVKQSHGESLEWIGGINPNDGGTIYNQKFKGKATLTVDKS | |
| | 720 | SKTAYMELRSLTSEDSAVFYCARGPSARFPYWGQGTLVTVSAAKTTP | |
| | | PSVYPLAPGSAAQTNSMVTLGCLVKGYFPEPVTVTWNSGSLSSGVHT | |
| | | FPAVLQSDLYTLSSSVTVPSSTWPSETVTCNVAHPASSTKVDKKIVP | |
| | | RDCGCKPCICTVPEVSSVFIFPPKPKDVLTITLTPKVTCVVVDISKD | |
| | | DPEVQFSWFVDDVEVHTAQTQPREEQFNSTFRSVSELPIMHQDWLNG | |
| | | KEFKCRVNSAAFPAPIEKTISKTKGRPKAPQVYTIPPPKEQMAKDKV | |
| | | SLTCMITDFFPEDITVEWQWNGQPAENYKNTQPIMDTDGSYFVYSKL | |
| | | NVQKSNWEAGNTFTCSVLHEGLHNHHTEKSLSHSPGRKRREGRGSLL | |
| | | TCGDVEENPGPMMSPAQFLFLLVLWIRETNGDVVMTQTPLTLSVTIG | |
| | | QPASISCKSSQSLLDSDGKTYLNWLLQRPGQSPKRLIYLVSKLDSGV | |
| | | PDRFTGSGSGTDFTLKISRVEAEDLGVYYCWQGTHFPRTFGGGTKLE | |
| | | IKRADAAPTVSIFPPSSEQLTSGGASVVCFLNNFYPKDINVKWKIDG | |
| | | SERQNGVLNSWTDQDSKDSTYSMSSTLTLTKDEYERHNSYTCEATHK | |
| | | TSTSPIVKSFNRNEC | |
| Ab250 | PHF-1 | gaggagccaccatgggctggagctggatcttcctgttcctgctgagc | 1989 |
| | optimized | ggcaccaccggcgtgctgagcgaggtgcagctgcagcagagcggccc | |
| | seq | cgagctggtgaagcccggcgccagcgtgaagatcagctgcaagacca | |
| | | gcggctacaccttcaccgagtacaccatccactgggtgaagcagagc | |
| | | cacggcgagagcctggagtggatcggcggcatcaaccccaacgacgg | |
| | | cggcaccatctacaaccagaagttcaagggcaaggccaccctgaccg | |
| | | tggacaagagcagcaagaccgcctacatggagctgcggagcctgacc | |
| | | agcgaggacagcgccgtgttctactgcgctcggggccccagcgcccg | |
| | | gttcccctactggggccagggcaccctggtgaccgtgagcgccgcca | |
| | | agaccacaccacccagcgtgtacccactggctccaggcagcgctgcc | |
| | | caaaccaacagcatggtgaccctgggctgcctggtgaagggctactt | |
| | | ccccgagcccgtgaccgtgacctggaacagcggcagcctgagcagcg | |
| | | gcgtgcacaccttcccagctgtgctccagtccgacctgtacaccctg | |
| | | agcagcagcgtgaccgtgcccagcagcacctggcccagcgagaccgt | |
| | | gacctgcaacgtggcccaccccgccagcagcaccaaggtggacaaga | |
| | | agatcgtgccccgggactgcggctgcaagccctgcatctgcaccgtg | |
| | | cctgaggtctccagcgtgttcatcttcccccccaagcccaaggacgt | |
| | | gctgaccatcaccctgacccctaaagtcacctgcgtggtggtggaca | |
| | | tcagcaaggacgaccccgaggtgcagttcagctggttcgtggacgac | |
| | | gtggaggtgcacaccgcccagacccagccccgggaggagcagttcaa | |
| | | cagcaccttccggagcgtgagcgagctgcccatcatgcaccaggact | |
| | | ggctgaacggcaaggagttcaagtgccgggtgaacagcgccgccttc | |
| | | cccgcccccatcgagaagaccatcagcaagaccaagggccgacccaa | |
| | | ggccccacaggtgtacaccatcccaccacccaaggagcagatggcca | |
| | | aggacaaagtcagcctgacctgcatgatcaccgacttcttccccgag | |
| | | gacatcaccgtggagtggcagtggaacggccagccagccgagaacta | |
| | | caagaacacccagcccatcatggacaccgacggcagctacttcgtgt | |
| | | acagcaagctgaacgtgcagaagagcaactgggaggccggcaacacc | |
| | | ttcacctgcagcgtgctgcacgagggcctgcacaaccaccacaccga | |
| | | gaagagcctgagccacagccccggacggaagcggcgcgagggacggg | |
| | | gcagcctgctgacctgcggcgacgtggaggagaacccaggccccatg | |
| | | atgagcccagcccagttcctgttcctgctggtgctgtggatccggga | |
| | | gaccaacggcgacgtggtgatgacccagaccccactgaccctgagcg | |
| | | tgaccatcggccagcccgccagcatcagctgcaagagcagccagagc | |
| | | ctgctggacagcgacggcaagacctacctgaactggctgctgcagcg | |
| | | gccaggccagagccccaagcggctgatctatctcgtcagcaagctgg | |
| | | acagcggcgtgcccgaccggttcaccggcagcggcagcggcaccgac | |
| | | ttcaccctgaagatcagccgggtggaggccgaggacctgggcgtgta | |
| | | ctactgctggcagggcacccactttccccggaccttcggcggcggca | |
| | | ccaagctggagatcaagcgggccgacgccgccccaacagtcagcatc | |
| | | tttccaccatcctccgagcagctcaccagcggcggcgccagcgtggt | |
| | | gtgcttcctgaacaacttctaccccaaggacatcaacgtgaagtgga | |
| | | agatcgacggcagcgagcggcagaacggcgtgctgaacagctggacc | |
| | | gaccaggacagcaaggacagcacctacagcatgagcagcaccctgac | |
| | | cctgaccaaggacgagtacgagcggcacaacagctacacctgcgagg | |
| | | ccacccacaagaccagcaccagccccatcgtgaagagcttcaaccgg | |
| | | aacgagtgctga | |
| Ab251 | PT3 VH | aagctggtggagagcggcggcgacctggtgaagcctggcggcagcct | 2241 |
| | | gaagctgagctgcgccgccagcggcttcaccttcagcagctacgcca | |
| | | tgagctgggtgagacagaaccctgagaagagactggagtgggtggcc | |
| | | agcatcagcaagggggcaacacctactaccctaacagcgtgaaggg | |
| | | cagattcaccatcagcagagacaacgccagaaacatcctgtacctgc | |
| | | agatgagcagcctgagaagcgaggacaccgccctgtactactgcgcc | |
| | | agaggctggggcgactacggctggttcgcctactggggccaggtgac | |
| | | cctggtgaccgtgagcgcc | |
| Ab252 | VH | gccaaaacgacacccccatctgtctatccactggcccctggatctgc | 2242 |
| | (constant- | tgcccaaactaactccatggtgaccctgggatgcctggtcaagggct | |
| | 309) | atttccctgagccagtgacagtgacctggaactctggatccctgtcc | |
| | | agcggtgtgcacaccttcccagctgtcctgcagtctgacctctacac | |
| | | tctgagcagctcagtgactgtcccctccagcacctggcccagcgaga | |
| | | ccgtcacctgcaacgttgcccacccggccagcagcaccaaggtggac | |
| | | aagaaaattgtgcccagggattgtggt | |
| Ab253 | VH | gccaaaacgacacccccatctgtctatccactggcccctggatctgc | 2243 |
| | (constant- | tgcccaaactaactccatggtgaccctgggatgcctggtcaagggct | |
| | 291) | atttccctgagccagtgacagtgacctggaactctggatccctgtcc | |
| | | agcggtgtgcacaccttcccagctgtcctgcagtctgacctctacac | |
| | | tctgagcagctcagtgactgtcccctccagcacctggcccagcgaga | |
| | | ccgtcacctgcaacgttgcccacccggccagcagcaccaaggtggac | |
| | | aagaaaatt | |
| Ab254 | PHF1 VH- | atggcgacgggttcaagaacttccctacttcttgcatttggcctgct | 2169 |
| | 435 | ttgtttgccgtggttacaggagggctcggcagctgccgaggtccagc | |
| | | tgcaacagtctggacctgagctggtgaagcctggggcttcagtgaag | |
| | | atatcctgcaagacttctggatacacattcactgaatacaccataca | |
| | | ctgggtgaagcagagccatggagagagccttgagtggattggaggta | |
| | | ttaatccaaacgatggtggtactatttacaaccagaagttcaagggc | |
| | | aaggccacattgactgtagacaagtcctccaaaacagcctacatgga | |
| | | gctccgcagcctgacatctgaggattctgcagtcttttactgtgcaa | |
| | | gagggccctccgccaggtttccttactggggccaagggactctggtc | |
| | | actgtctctgca | |
| Ab255 | PHF1 VH- | atgggatggagctggatctttctctttctcctgtcaggaactacagg | 2170 |
| | 408 | tgtcctctctgaggtccagctgcaacagtctggacctgagctggtga | |
| | | agcctggggcttcagtgaagatatcctgcaagacttctggatacaca | |
| | | ttcactgaatacaccatacactgggtgaagcagagccatggagagag | |
| | | ccttgagtggattggaggtattaatccaaacgatggtggtactattt | |
| | | acaaccagaagttcaagggcaaggccacattgactgtagacaagtcc | |
| | | tccaaaacagcctacatggagctccgcagcctgacatctgaggattc | |
| | | tgcagtcttttactgtgcaagagggccctccgccaggtttccttact | |
| | | ggggccaagggactctggtcactgtctctgca | |

[1472] In some embodiments, the antibody molecules comprise the HCDR1, HCDR2, HCDR3, LCDR1, LCDR2, and/or LCDR3 sequences, the VH and/or VL sequences, or the heavy and/or light chain sequences, of an antibody molecule described in Tables 7 and 8, e.g., an art-recognized anti-tau antibody molecule selected from the group consisting of: 7295-M6, 7297-2M1, 7298-M1, 7299-M2, 7299-M5, 7299-M9, hC10.2, C10.2, C8.3, C5.2, D1.2, IPN001, IPN002, MC1, PT1, PT3, PHF1, and AT8.

[1473] In some embodiments, the ant-tau antibody molecule is IPN002, a fragment thereof, or a variant thereof. In some embodiments, the anti-tau antibody molecule comprises the HCDR1, HCDR2, and HCDR3 sequences, and/or the LCDR1, LCDR2, and LCDR3 sequences, of IPN002. In some embodiments, the antibody molecule comprises the HCDR1, HCDR2, and HCDR3 sequences set forth in SEQ ID NOs: 1777, 1778, and 1779, respectively, and LCDR1, LCDR2, and LCDR3 sequences set forth in SEQ ID NOs: 1889, 1890, and 1891, respectively. In some embodiments, one or more of the CDRs (or collectively all of the CDRs) have one, two, three, four, five or more changes, e.g., amino acid substitutions, insertions, or deletions, relative to the amino acid sequence of SEQ ID NOs: 1777, 1778, 1779, 1889, 1890, and/or 1891. In some embodiments, the antibody molecule comprises the VH and/or VL sequences of IPN002. In some embodiments, the antibody molecule comprises a VH comprising the amino acid sequence of SEQ ID NO: 1822 and/or a VL comprising the amino acid sequence of SEQ ID NO: 1941, or a sequence substantially identical, e.g., having at least about 70%, 75%, 80%, 85%, 90%, 92%, 95%, 97%, 98%, or 99% sequence identity thereto, or having at least one, two, or three modifications (e.g., substitutions, e.g., conservative substitutions), but not more than 30, 20, or 10 modifications (e.g., substitutions, e.g., conservative substitutions) relative to the VH and/or VL sequence. In some embodiments, the anti-tau antibody molecule is an antibody which competes for binding to tau (e.g., human tau) with IPN002. In some embodiments, the anti-tau antibody molecule is an antibody which binds to the same epitope as, substantially the same epitope as, an epitope that overlaps with, or an epitope that substantially overlaps with, IPN002.

[1474] In some embodiments, the ant-tau antibody molecule is AT8, a fragment thereof, or a variant thereof. In some embodiments, the anti-tau antibody molecule comprises the HCDR1, HCDR2, and HCDR3 sequences, and/or the LCDR1, LCDR2, and LCDR3 sequences, of AT8. In some embodiments, one or more of the CDRs (or collectively all of the CDRs) have one, two, three, four, five or more changes, e.g., amino acid substitutions, insertions, or deletions, relative to the amino acid sequence of one or more of the CDRs of AT8. In some embodiments, the antibody molecule comprises the VH and/or VL sequences of AT8, or a sequence substantially identical, e.g., having at least about 70%, 75%, 80%, 85%, 90%, 92%, 95%, 97%, 98%, or 99% sequence identity thereto, or having at least one, two, or three modifications (e.g., substitutions, e.g., conservative substitutions), but not more than 30, 20, or 10 modifications (e.g., substitutions, e.g., conservative substitutions) relative to the VH and/or VL sequence of AT8. In some embodiments, the anti-tau antibody molecule is an antibody which competes for binding to tau (e.g., human tau) with AT08. In some embodiments, the anti-tau antibody molecule is an antibody which binds to the same epitope as, substantially the same epitope as, an epitope that overlaps with, or an epitope that substantially overlaps with, AT08.

[1475] In some embodiments, the ant-tau antibody molecule is PT3, a fragment thereof, or a variant thereof. In some embodiments, the anti-tau antibody molecule comprises the HCDR1, HCDR2, and HCDR3 sequences, and/or the LCDR1, LCDR2, and LCDR3 sequences, of PT3. In some embodiments, the antibody molecule comprises the HCDR1, HCDR2, and HCDR3 sequences set forth in SEQ ID NOs: 1790, 1792, and 1794, respectively, and LCDR1, LCDR2, and LCDR3 sequences set forth in SEQ ID NOs: 1908, 1910, and 1912, respectively. In some embodiments, one or more of the CDRs (or collectively all of the CDRs) have one, two, three, four, five or more changes, e.g., amino acid substitutions, insertions, or deletions, relative to the amino acid sequence of SEQ ID NO: 1790, 1792, 1794, 1908, 1910, and/or 1912. In some embodiments, the antibody molecule comprises the VH and/or VL sequences of PT3. In some embodiments, the antibody molecule comprises a VH comprising the amino acid sequence of SEQ ID NO: 1849 and/or a VL comprising the amino acid sequence of SEQ ID NO: 1970, or a sequence substantially identical, e.g., having at least about 70%, 75%, 80%, 85%, 90%, 92%, 95%, 97%, 98%, or 99% sequence identity thereto, or having at least one, two, or three modifications (e.g., substitutions, e.g., conservative substitutions), but not more than 30, 20, or 10 modifications (e.g., substitutions, e.g., conservative substitutions) relative to the VH and/or VL sequence. In some embodiments, the anti-tau antibody molecule is an antibody which competes for binding to tau (e.g., human tau) with PT3. In some embodiments, the anti-tau antibody molecule is an antibody which binds to the same epitope as, substantially the same epitope as, an epitope that overlaps with, or an epitope that substantially overlaps with, PT3.

[1476] In some embodiments, the ant-tau antibody molecule is UCB, a fragment thereof, or a variant thereof. In some embodiments, the anti-tau antibody molecule comprises the HCDR1, HCDR2, and HCDR3 sequences, and/or the LCDR1, LCDR2, and LCDR3 sequences, of UCB. In some embodiments, one or more of the CDRs (or collectively all of the CDRs) have one, two, three, four, five or more changes, e.g., amino acid substitutions, insertions, or deletions, relative to the amino acid sequence of one or more of the CDRs of UCB. In some embodiments, the antibody molecule comprises the VH and/or VL sequences of UCB, or a sequence substantially identical, e.g., having at least about 70%, 75%, 80%, 85%, 90%, 92%, 95%, 97%, 98%, or 99% sequence identity thereto, or having at least one, two, or three modifications (e.g., substitutions, e.g., conservative substitutions), but not more than 30, 20, or 10 modifications (e.g., substitutions, e.g., conservative substitutions) relative to the VH and/or VL sequence. In some embodiments, the anti-tau antibody molecule is an antibody which competes for binding to tau (e.g., human tau) with UCB. In some embodiments, the anti-tau antibody molecule is an antibody which binds to the same epitope as, substantially the same epitope as, an epitope that overlaps with, or an epitope that substantially overlaps with, UCB.

[1477] In some embodiments, the ant-tau antibody molecule is PT76, a fragment thereof, or a variant thereof. In some embodiments, the anti-tau antibody molecule comprises the HCDR1, HCDR2, and HCDR3 sequences, and/or the LCDR1, LCDR2, and LCDR3 sequences, of PT76. In some embodiments, one or more of the CDRs (or collectively all of the CDRs) have one, two, three, four, five or more changes, e.g., amino acid substitutions, insertions, or deletions, relative to the amino acid sequence of one or more of the CDRs of PT76. In some embodiments, the antibody molecule comprises the VH and/or VL sequences of PT76, or a sequence substantially identical, e.g., having at least about 70%, 75%, 80%, 85%, 90%, 92%, 95%, 97%, 98%, or 99% sequence identity thereto, or having at least one, two, or three modifications (e.g., substitutions, e.g., conservative substitutions), but not more than 30, 20, or 10 modifications (e.g., substitutions, e.g., conservative substitutions) relative to the VH and/or VL sequence of PT76. In some embodiments, the anti-tau antibody molecule is an antibody which competes for binding to tau (e.g., human tau) with PT76. In some embodiments, the anti-tau antibody molecule is an antibody which binds to the same epitope as, substantially the same epitope as, an epitope that overlaps with, or an epitope that substantially overlaps with, PT76.

[1478] In some embodiments, the ant-tau antibody molecule is PHF1, a fragment thereof, or a variant thereof. In some embodiments, the anti-tau antibody molecule comprises the HCDR1, HCDR2, and HCDR3 sequences, and/or the LCDR1, LCDR2, and LCDR3 sequences, of PHF1. In some embodiments, one or more of the CDRs (or collectively all of the CDRs) have one, two, three, four, five or more changes, e.g., amino acid substitutions, insertions, or deletions, relative to the amino acid sequence of one or more of the CDRs of PHF1. In some embodiments, the antibody molecule comprises the VH and/or VL sequences of PHF1. In some embodiments, the antibody molecule comprises a VH comprising the amino acid sequence of SEQ ID NO: 1844 and/or a VL comprising the amino acid sequence of SEQ ID NO: 1964, or a sequence substantially identical, e.g., having at least about 70%, 75%, 80%, 85%, 90%, 92%, 95%, 97%, 98%, or 99% sequence identity thereto, or having at least one, two, or three modifications (e.g., substitutions, e.g., conservative substitutions), but not more than 30, 20, or 10 modifications (e.g., substitutions, e.g., conservative substitutions) relative to the VH and/or VL sequence. In some embodiments, the anti-tau antibody molecule is an antibody which competes for binding to tau (e.g., human tau) with PHF1. In some embodiments, the anti-tau antibody molecule is an antibody which binds to the same epitope as, substantially the same epitope as, an epitope that overlaps with, or an epitope that substantially overlaps with, PHF1.

[1479] In some embodiments, the ant-tau antibody molecule is C10.2, a fragment thereof, or a variant thereof. In some embodiments, the anti-tau antibody molecule comprises the HCDR1, HCDR2, and HCDR3 sequences, and/or the LCDR1, LCDR2, and LCDR3 sequences, of C10.2. In some embodiments, the antibody molecule comprises the HCDR1, HCDR2, and HCDR3 sequences set forth in SEQ ID NOs: 1761, 1762, and 1763, respectively, and LCDR1, LCDR2, and LCDR3 sequences set forth in SEQ ID NOs: 1880, 1881, and 1882, respectively. In some embodiments, one or more of the CDRs (or collectively all of the CDRs) have one, two, three, four, five or more changes, e.g., amino acid substitutions, insertions, or deletions, relative to the amino acid sequence of SEQ ID NO: 1761, 1762, 1763, 1880, 1881, and/or 1882. In some embodiments, the antibody molecule comprises the VH and/or VL sequences of C10.2. In some embodiments, the antibody molecule comprises a VH comprising the amino acid sequence of SEQ ID NO: 1803 and/or a VL comprising the amino acid sequence of SEQ ID NO: 1919, or a sequence substantially identical, e.g., having at least about 70%, 75%, 80%, 85%, 90%, 92%, 95%, 97%, 98%, or 99% sequence identity thereto, or having at least one, two, or three modifications (e.g., substitutions, e.g., conservative substitutions), but not more than 30, 20, or 10 modifications (e.g., substitutions, e.g., conservative substitutions) relative to the VH and/or VL sequence. In some embodiments, the anti-tau antibody molecule is an antibody which competes for binding to tau (e.g., human tau) with C10.2. In some embodiments, the anti-tau antibody molecule is an antibody which binds to the same epitope as, substantially the same epitope as, an epitope that overlaps with, or an epitope that substantially overlaps with, C10.2.

[1480] In some embodiments, the anti-tau antibody molecule may target any of the antigenic regions or epitopes described in International Publication WO2021/211753, the contents of which are herein incorporated by reference in their entirety. For instance, in some embodiments, the anti-tau antibody molecule comprises HCDR1, HCDR2, and/or HCDR3, and LCDR1, LCDR2, and/or LCDR3 sequences encompassed by the consensus CDR sequences described in Table 9, for example, the CDR sequences of V0022, V0023, and V0024 (as shown in Tables 10-13).

TABLE 9
Consensus CDRs for exemplary anti-tau antibodies
V0022, V0023 and V0024

| SEQ ID NO | Description | Sequence |
|---|---|---|
| SEQ ID NO: 1631 | HCDR1 | GX₁TFTX₂X₃, wherein |
| (Chothia) | | X₁ is For Y; |
| | | X₂ is R or I; and |
| | | X₃ is Y or F |
| SEQ ID NO: 1551 | HCDR2 | NPNNGG |
| (Chothia) | | |
| SEQ ID NO: 1552 | HCDR3 | GTGTGAMDY |
| (Chothia) | | |
| SEQ ID NO: 1632 | LCDR1 | RSSQSLVHX₁NGX₂TX₃LY, wherein |
| (Chothia) | | X₁ is N or S; |
| | | X₂ is I or N; and |
| | | X₃ is Y or H |
| SEQ ID NO: 1633 | LCDR2 | RVSX₁RFS, wherein |
| (Chothia) | | X₁ is N or S |
| SEQ ID NO: 1566 | LCDR3 | FQGTHVPRT |
| (Chothia) | | |
| SEQ ID NO: 1634 | HCDR1 | X₁X₂WMH, wherein |
| (Kabat) | | X₁ is R or I; and |
| | | X₂ is Y or F |
| SEQ ID NO: 1635 | HCDR2 | X₁INPNNGGX₂DX₃NEX₄FKX₅, wherein |
| (Kabat) | | X₁ is N or K; |
| | | X₂ is T or G; |
| | | X₃ is F, Y, or N; |
| | | X₄ is K or R; and |
| | | X₅ is N or S |
| SEQ ID NO: 1552 | HCDR3 | GTGTGAMDY |
| (Kabat) | | |
| SEQ ID NO: 1636 | LCDR1 | RSSQSLVHX₁NGX₂TX₃LY, wherein |
| (Kabat) | | X₁ is N or S; |
| | | X₂ is I or N; and |
| | | X₃ is Y or H |
| SEQ ID NO: 1633 | LCDR2 | RVSX₁RFS, wherein |
| (Kabat) | | X₁ is N or S |
| SEQ ID NO: 1566 | LCDR3 | FQGTHVPRT |
| (Kabat) | | |
| SEQ ID NO: 1637 | HCDR1 | GX₁TFTX₂X₃W, wherein |
| (IMGT) | | X₁ is For Y; |
| | | X₂ is R or I; and |
| | | X₃ is Y or F |
| SEQ ID NO: 1638 | HCDR2 | INPNNGG X₁, wherein |
| (IMGT) | | X₁ is T or G |
| SEQ ID NO: 1557 | HCDR3 | ARGTGTGAMDY |
| (IMGT) | | |
| SEQ ID NO: 1639 | LCDR1 | QSLVHX₁INGX₂TX₃, wherein |
| (IMGT) | | X₁ is N or S; |
| | | X₂ is I or N; and |
| | | X₃ is Y or H |
| SEQ ID NO: 1569 | LCDR2 | RVS |
| (IMGT) | | |
| SEQ ID NO: 1566 | LCDR3 | FQGTHVPRT |
| (IMGT) | | |

[1481] In some embodiments, the anti-tau antibody molecule comprises at least one, two, or three complementarity determining regions (CDRs) from a VH comprising an amino acid sequence in Tables 9-16, or is encoded by a nucleic acid sequence in Table 13 or 14; or a sequence substantially identical (e.g., having at least about 70%, 75%, 80%, 85%, 90%, 92%, 95%, 97%, 98%, or 99% sequence identity) to any of the aforesaid sequences. In some embodiments, one or more of the CDRs (or collectively all of the CDRs) have one, two, three, four, five or more changes, e.g., amino acid substitutions, insertions, or deletions, relative to the amino acid sequence shown in Table 9-16, or encoded by a nucleotide sequence shown in Table 13 or 14. In some embodiments, the encoded anti-tau antibody molecule includes a substitution in a HCDR, e.g., one or more substitutions in a HCDR1, HCDR2 and/or HCDR3.

[1482] In some embodiments, the anti-tau antibody molecule comprises at least one, two, or three complementarity determining regions (CDRs) from a VL comprising an amino acid sequence in Tables 9-16, or is encoded by a nucleic acid sequence in Table 13 or 14; or a sequence substantially identical (e.g., having at least about 80%, 85%, 90%, 92%, 95%, 97%, 98%, or 99% sequence identity) to any of the aforesaid sequences. In some embodiments, one or more of the CDRs (or collectively all of the CDRs) have one, two, three, four, five or more changes, e.g., amino acid substitutions, insertions, or deletions, relative to the amino acid sequence shown in Tables 9-16, or encoded by a nucleotide sequence shown in Table 13 or 14. In some embodiments, the anti-tau antibody molecule includes a substitution in a LCDR, e.g., one or more substitutions in a LCDR1, LCDR2, and/or LCDR3 of the light chain.

[1483] In some embodiments, the anti-tau antibody molecule comprises at least one, two, three, four, five or six CDRs (or collectively all of the CDRs) from a VH and VL comprising an amino acid sequence shown in Table 9-16, or is encoded by a nucleotide sequence shown in Table 13 or 14. In some embodiments, one or more of the CDRs (or collectively all of the CDRs) have one, two, three, four, five, six or more changes, e.g., amino acid substitutions, insertions, or deletions, relative to the CDRs shown in Table 9-16, or encoded by a nucleotide sequence shown in Table 13 or 14.

[1484] In some embodiments, the anti-tau antibody molecule comprises all three CDRs from a VH, all three CDRs from a VL, or both (e.g., all six CDRs from a VH and a VL) comprising an amino acid sequence shown in Table 9-16, or is encoded by a nucleotide sequence shown in Table 13 or 14.

[1485] In some embodiments, the anti-tau antibody molecule comprises a VH from an antibody chosen from V0001-V0065, V1001-V1005, or V2001-V2005, e.g., as described in Table 13 and WO2021/211753, the contents of which are hereby incorporated by reference, or VY011, VY007, VY004, VY006, VY018, VY003, VY016, VY017, VY012, VY009, VY010, VY022, VY001, VY019, VY020, VY005, VY002, VY014, VY008, or VY013, e.g., as described in Tables X1-X3 and WO2022/132923 (see, e.g., Examples 3, 4, and 6-9 of WO2022/132923), the contents of which are hereby incorporated by reference, or a sequence substantially identical (e.g., having at least about 70%, 75%, 80%, 85%, 90%, 92%, 95%, 97%, 98%, or 99% sequence identity) to any of the aforesaid sequences. In some embodiments, the VH comprises an amino acid sequence having at least one, two, or three modifications (e.g., substitutions, e.g., conservative substitutions), but not more than 30, 20, or 10 modifications (e.g., substitutions, e.g., conservative substitutions), relative to an amino acid sequence of a VH provided in Table 13 and WO2021/211753 or Tables 14-16 and WO2022/132923.

[1486] In some embodiments, the nucleotide sequence encoding the anti-tau antibody molecule comprises the nucleotide sequence of a VH from an antibody molecule chosen from V0001-V0065, V1001-V1005, or V2001-V2005, e.g., as described in Table 13 and WO2021/211753, or VY011, VY007, VY004, VY006, VY018, VY003, VY016, VY017, VY012, VY009, VY010, VY022, VY001, VY019, VY020, VY005, VY002, VY014, VY008, or VY013, e.g., as described in Table 14, or a nucleotide sequence substantially identical (e.g., having at least about 70%, 75%, 80%, 85%, 90%, 92%, 95%, 97%, 98%, or 99% sequence identity) to any of the aforesaid sequences.

[1487] In some embodiments, the anti-tau antibody molecule comprises a VL from an antibody molecule chosen from V0001-V0065, V1001-V1005, or V2001-V2005, e.g., as described in Table 13 and WO2021/211753, or VY011, VY007, VY004, VY006, VY018, VY003, VY016, VY017, VY012, VY009, VY010, VY022, VY001, VY019, VY020, VY005, VY002, VY014, VY008, or VY013, e.g., as described in Tables 14-16, or a sequence substantially identical (e.g., having at least about 70%, 75%, 80%, 85%, 90%, 92%, 95%, 97%, 98%, or 99% sequence identity) to any of the aforesaid sequences. In some embodiments, the VL comprises an amino acid sequence having at least one, two, or three modifications (e.g., substitutions, e.g., conservative substitutions), but not more than 30, 20, or 10 modifications (e.g., substitutions, e.g., conservative substitutions), relative to an amino acid sequence of a VL provided in Table 13 and WO2021/211753.

[1488] In some embodiments, the nucleotide sequence encoding the anti-tau antibody molecule comprises the nucleotide sequence of a VL from an antibody chosen from V0001-V0065, V1001-V1005, or V2001-V2005, e.g., as described in Table 13 and WO2021/211753, or VY011, VY007, VY004, VY006, VY018, VY003, VY016, VY017, VY012, VY009, VY010, VY022, VY001, VY019, VY020, VY005, VY002, VY014, VY008, or VY013, e.g., as described in Table 14 and WO2022/132923, or a nucleotide sequence substantially identical (e.g., having at least about 70%, 75%, 80%, 85%, 90%, 92%, 95%, 97%, 98%, or 99% sequence identity) to any of the aforesaid sequences.

[1489] In some embodiments, the anti-tau antibody molecule comprises a VH and a VL from an antibody chosen from V0001-V0065, V1001-V1005, or V2001-V2005, e.g., as described in Table 13 and WO2021/211753, or VY011, VY007, VY004, VY006, VY018, VY003, VY016, VY017, VY012, VY009, VY010, VY022, VY001, VY019, VY020, VY005, VY002, VY014, VY008, or VY013, e.g., as described in Tables 14-16 and WO2022/132923, or a sequence substantially identical (e.g., having at least about 70%, 75%, 80%, 85%, 90%, 92%, 95%, 97%, 98%, or 99% sequence identity) to any of the aforesaid sequences. In some embodiments, the anti-tau antibody molecule comprises a VH comprising an amino acid sequence having at least one, two, or three modifications (e.g., substitutions, e.g., conservative substitutions), but not more than 30, 20, or 10 modifications (e.g., substitutions, e.g., conservative substitutions), relative to an amino acid sequence of a VH provided in Table 13 and WO2021/211753 or Tables 14-16 and WO2022/132923; and a VL comprising an amino acid sequence having at least one, two, or three modifications (e.g., substitutions, e.g., conservative substitutions), but not more than 30, 20, or 10 modifications (e.g., substitutions, e.g., conservative substitutions), relative to an amino acid sequence of a VL provided in Table 13 and WO2021/211753 or Tables 14-16 and WO2022/132923.

[1490] In some embodiments, the anti-tau antibody molecule comprises HCDR1, HCDR2, HCDR3, LCDR1, LCDR2, and LCDR3 sequences set forth in (a) SEQ ID NOs: 1631, 1551, 1552, 1632, 1633, and 1566, respectively, (b) SEQ ID NOs: 1634, 1635, 1552, 1636, 1633, and 1566, respectively, (c) SEQ ID NOs: 1637, 1638, 1557, 1639, 1569, and 1566, respectively, (d) SEQ ID NOs: 1550, 1551, 1552, 1564, 1565, and 1566, respectively, (e) SEQ ID NO: 1553, 1554, 1552, 1567, 1565, and 1566, respectively, (f) SEQ ID NOs: 1555, 1556, 1557, 1568, 1569, and 1566, respectively, (g) SEQ ID NOs: 1575, 1551, 1552, 1585, 1565, and 1566, respectively, (h) SEQ ID NOs: 1576, 1577, 1552, 1585, 1565, and 1566, respectively, (i) SEQ ID NOs: 1578, 1579, 1557, 1586, 1569, and 1566, respectively, (j) SEQ ID NOs: 1593, 1551, 1552, 1601, 1602, and 1566, respectively, (k) SEQ ID NO: 1594, 1595, 1552, 1601, 1602, and 1566, respectively, (1) SEQ ID NOs: 1596, 1556, 1557, 1603, 1569, and 1566, respectively, (m) SEQ ID NOs: 1608, 1609, 1610, 1621, 1622, and 1623, respectively, (n) SEQ ID NO: 1611, 1612, 1610, 1621, 1622, and 1623, respectively, (o) SEQ ID NOs: 1613, 1614, 1615, 1624, 1625, and 1623, respectively, (p) SEQ ID NOs: 1525, 1526, 1527, 1539, 1540, and 1541, respectively, (q) SEQ ID NO: 1528, 1529, 1527, 1539, 1540, and 1541, respectively, (r) SEQ ID NOs: 1530, 1531, 1532, 1542, 1543, and 1541, respectively, (s) SEQ ID NOs: 1500, 1501, 1502, 1514, 1515, and 1516, respectively, (t) SEQ ID NO: 1503, 1504, 1502, 1514, 1515, and 1516, respectively, (u) SEQ ID NOs: 1505, 1506, 1507, 1517, 1518, and 1516, respectively, (v) SEQ ID NOs: 1777, 1778, 1779, 1889, 1890, and 1891, respectively, (w) SEQ ID NOs: 1790, 1792, 1794, 1908, 1910, and 1912, respectively, (x) SEQ ID NOs: 1761, 1762, 1763, 1880, 1881, and 1882, respectively, (y) SEQ ID NOs: 2200, 2201, 2202, 2207, 2208, and 2209, respectively, (z) SEQ ID NOs: 2232, 2233, 2234, 2238, 2239, and 2240, respectively, (za) SEQ ID NOs: 2248, 2219, 2249, 2207, 2208, and 2224, respectively, (zb) SEQ ID NOs: 2218, 2219, 2220, 2207, 2208, and 2224, respectively, (zc) SEQ ID NOs: 2200, 2257, 2258, 2262, 2263, and 2264, respectively, (zd) SEQ ID NOs: 2415, 2416, 2417, 2420, 2421, and 2422, respectively, (ze) SEQ ID NOs: 2273, 2274, 2275, 2207, 2208, and 2277, respectively, (zf) SEQ ID NOs: 2284, 2285, 2286, 2289, 2290, and 2291, respectively, (zg) SEQ ID NOs: 2284, 2299, 2300, 2302, 2303, and 2304, respectively, (zh) SEQ ID NOs: 2313, 2314, 2315, 2319, 2320, and 2321, respectively, (zi) SEQ ID NOs: 2330, 2331, 2332, 2262, 2336, and 2337, respectively, (zj) SEQ ID NOs: 2345, 2346, 2347, 2351, 2352, and 2353, respectively, (zk) SEQ ID NOs: 2345, 2346, 2347, 2361, 2362, and 2363, respectively, (zl) SEQ ID NOs: 2371, 2372, 2373, 2207, 2208, and 2224, respectively, (zm) SEQ ID NOs: 2381, 2382, 2383, 2262, 2263, and 2385, respectively, (zn) SEQ ID NOs: 2284, 2392, 2393, 2396, 2239, and 2397, respectively, (zo) SEQ ID NOs: 2284, 2392, 2393, 2404, 2405, and 2406, respectively, (zp) SEQ ID NOs: 2430, 2431, 2432, 2435, 2436, and 2437, respectively, (zq) SEQ ID NOs: 2445, 2446, 2447, 2452, 2421, and 2453, respectively, or (zr) SEQ ID NOs: 2459, 2460, 2461, 2465, 2466, and 2467, respectively.

[1491] In some embodiments, the anti-tau antibody molecule comprises VH and/or VL sequences set forth in: (a) SEQ ID NOs: 1562 and 1573, respectively; (b) SEQ ID NOs: 1512 and 1523, respectively; (c) SEQ ID NOs: 1537 and 1548, respectively; (d) SEQ ID NOs: 1583 and 1591, respectively; (e) SEQ ID NOs: 1599 and 1606, respectively; (f) SEQ ID NOs: 1619 and 1629, respectively; (g) SEQ ID NOs: 1822 and 1941, respectively; (h) SEQ ID NOs: 1849 and 1970, respectively; (i) SEQ ID NOs: 1844 and 1964, respectively; (j) SEQ ID NOs: 1803 and 1919, respectively; (k) SEQ ID NOs: 2214 and 2215, respectively; (1) SEQ ID NOs: 2244 and 2245, respectively; (m) SEQ ID NOs: 2253 and 2254, respectively; (n) SEQ ID NOs: 2228 and 2229, respectively; (o) SEQ ID NOs: 2269 and 2270, respectively; (p) SEQ ID NOs: 2426 and 2427, respectively; (q) SEQ ID NOs: 2280 and 2281, respectively; (r) SEQ ID NOs: 2295 and 2296, respectively; (s) SEQ ID NOs: 2309 and 2310, respectively; (t) SEQ ID NOs: 2326 and 2327, respectively; (u) SEQ ID NOs: 2341 and 2342, respectively; (v) SEQ ID NOs: 2357 and 2358, respectively; (w) SEQ ID NOs: 2367 and 2368, respectively; (x) SEQ ID NOs: 2377 and 2378, respectively; (y) SEQ ID NOs: 2388 and 2389, respectively; (z) SEQ ID NOs: 2400 and 2401, respectively; (za) SEQ ID NOs: 2411 and 2412, respectively; (zb) SEQ ID NOs: 2441 and 2442, respectively; (zc) SEQ ID NOs: 2455 and 2456, respectively; or (zd) SEQ ID NOs: 2470 and 2471, respectively.

[1492] In some embodiments, the anti-tau antibody molecule comprises a heavy chain constant region, e.g., a human IgG1, IgG2, IgG3, or IgG4 constant regions, or a murine IgG1, IgG2A, IgG2B, IgG2C, or IgG3 constant regions. In some embodiments, the heavy chain constant comprises an amino acid sequence set forth in Table 17, or a sequence substantially identical (e.g., having at least about 70%, 75%, 80%, 85%, 90%, 92%, 95%, 97%, 98%, or 99% sequence identity) to any of the aforesaid sequences. In some embodiments, a nucleic acid encoding the heavy chain constant region comprises a nucleotide sequence set forth in Table 17, or a nucleotide sequence substantially identical (e.g., having at least about 70%, 75%, 80%, 85%, 90%, 92%, 95%, 97%, 98%, or 99% sequence identity) to any of the aforesaid sequences.

[1493] In some embodiments, the anti-tau antibody molecule (e.g., the anti-tau antibody molecule described in any of Tables 9-16) comprises a light chain constant region, e.g., a kappa light chain constant region, e.g., a human kappa or lambda light chain constant region or a murine kappa or lambda light chain constant region. In some embodiments, the light chain constant comprises an amino acid sequence set forth in Table 17, or a sequence substantially identical (e.g., having at least about 70%, 75%, 80%, 85%, 90%, 92%, 95%, 97%, 98%, or 99% sequence identity) to any of the aforesaid sequences. In some embodiments, nucleic acid encoding the light chain constant region comprises a nucleotide sequence set forth in Table 17, or a nucleotide sequence substantially identical (e.g., having at least about 70%, 75%, 80%, 85%, 90%, 92%, 95%, 97%, 98%, or 99% sequence identity) to any of the aforesaid sequences.

[1494] In some embodiments, the anti-tau antibody molecule (e.g., the anti-tau antibody molecule described in any of Tables 9-16) comprises a heavy chain constant region and a light chain constant region. In some embodiments, the heavy chain constant region and the light chain constant region comprise an amino acid sequence set forth in Table 17, or a sequence substantially identical (e.g., having at least about 80%, 85%, 90%, 92%, 95%, 97%, 98%, or 99% sequence identity) thereto. In some embodiments, the nucleotide sequence encoding the anti-tau antibody molecule comprises the nucleotide sequence of a heavy chain constant region and the nucleotide sequence of a kappa or lambda light chain constant region. In some embodiments, the nucleotide sequence encoding the heavy chain constant region and light chain constant region comprise a nucleotide sequence set forth in Table 17, or a nucleotide sequence substantially identical (e.g., having at least about 80%, 85%, 90%, 92%, 95%, 97%, 98%, or 99% sequence identity) thereto.

TABLE 10
CDR sequences of selected antibodies based on Kabat numbering system

| Ab ID | HC CDR1 | HC CDR2 | HC CDR3 | LC CDR1 | LC CDR2 | LC CDR3 |
|---|---|---|---|---|---|---|
| V0004 | NYWMH | RIDPNSGGT | DFDV | RASGNIH | NAKTLPD | QHFWSTPLT |
| | (SEQ ID | RYNEKFKN | (SEQ ID | NYLA | (SEQ ID | (SEQ ID |
| | NO: 1503) | (SEQ ID | NO: | (SEQ ID | NO: 1515) | NO: 1516) |
| | | NO: 1504) | 1502) | NO: | | |
| | | | | 1514) | | |
| V0009 | DYYMS | LIRNKAKGF | DINY | KSSQSLL | WASSRES | QQYYSYPRT |
| | (SEQ ID | TTEYSASVK | (SEQ ID | YSTNQEN | (SEQ ID | (SEQ ID |
| | NO: 1528) | G | NO: | YLA | NO: 1540) | NO: 1541) |
| | | (SEQ ID | 1527) | (SEQ ID | | |
| | | NO: 1529) | | NO: | | |
| | | | | 1539) | | |
| V0022 | RYWMH | NINPNNGGT | GTGTGAM | RSSQSLV | RVSNRFS | FQGTHVPRT |
| | (SEQ ID | DFNEKFKN | DY | HNNGITY | (SEQ ID | (SEQ ID |
| | NO: 1553) | (SEQ ID | (SEQ ID | LY | NO: 1565) | NO: 1566) |
| | | NO: 1554) | NO: | (SEQ ID | | |
| | | | 1552) | NO: | | |
| | | | | 1567) | | |
| V0023 | IFWMH | KINPNNGGG | GTGTGAM | RSSQSLV | RVSNRFS | FQGTHVPRT |
| | (SEQ ID | DYNEKFKS | DY | HSNGITH | (SEQ ID | (SEQ ID |
| | NO: 1576) | (SEQ ID | (SEQ ID | LY | NO: 1565) | NO: 1566) |
| | | NO: 1577) | NO: | (SEQ ID | | |
| | | | 1552) | NO: | | |
| | | | | 1585) | | |
| V0024 | RFWMH | NINPNNGGT | GTGTGAM | RSSQSLV | RVSSRFS | FQGTHVPRT |
| | (SEQ ID | DNNERFKS | DY | HSNGNTH | (SEQ ID | (SEQ ID |
| | NO: 1594) | (SEQ ID | (SEQ ID | LY | NO: 1602) | NO: 1566) |
| | | NO: 1595) | NO: | (SEQ ID | | |
| | | | 1552) | NO: | | |
| | | | | 1601) | | |
| V0052 | TSAMGVS | HIYWDDDKR | RRRGYGM | KASQSVS | YASNRCT | QQDYRSPLT |
| | (SEQ ID | YNPSLKS | DY | NDVA | (SEQ ID | (SEQ ID |
| | NO: 1611) | (SEQ ID | (SEQ ID | (SEQ ID | NO: 1622) | NO: 1623) |
| | | NO: 1612) | NO: | NO: | | |
| | | | 1610) | 1621) | | |

TABLE 11
CDR sequences of selected antibodies based on Chothia numbering system

| Ab ID | HC CDR1 | HC CDR2 | HC CDR3 | LC CDR1 | LC CDR2 | LC CDR3 |
|---|---|---|---|---|---|---|
| V0004 | DYTFTNY | DPNSGG | DFDV | RASGNIH | NAKTLPD | QHFWSTPLT |
| | (SEQ ID | (SEQ ID | (SEQ ID | NYLA | (SEQ ID | (SEQ ID |
| | NO: 1500) | NO: 1501) | NO: | (SEQ ID | NO: 1515) | NO: 1516) |
| | | | 1502) | NO: | | |
| | | | | 1514) | | |
| V0009 | GFTFTDY | RNKAKGFT | DINY | KSSQSLL | WASSRES | QQYYSYPRT |
| | (SEQ ID | (SEQ ID | (SEQ ID | YSTNQEN | (SEQ ID | (SEQ ID |
| | NO: 1525) | NO: 1526) | NO: | YLA | NO: 1540) | NO: 1541) |
| | | | 1527) | (SEQ ID | | |
| | | | | NO: | | |
| | | | | 1539) | | |
| V0022 | GFTFTRY | NPNNGG | GTGTGAM | RSSQSLV | RVSNRFS | FQGTHVPRT |
| | (SEQ ID | (SEQ ID | DY | HNNGITY | (SEQ ID | (SEQ ID |
| | NO: 1550) | NO: 1551) | (SEQ ID | LY | NO: 1565) | NO: 1566) |
| | | | NO: | (SEQ ID | | |
| | | | 1552) | NO: | | |
| | | | | 1564) | | |
| V0023 | GYTFTIF | NPNNGG | GTGTGAM | RSSQSLV | RVSNRFS | FQGTHVPRT |
| | (SEQ ID | (SEQ ID | DY | HSNGITH | (SEQ ID | (SEQ ID |
| | NO: 1575) | NO: 1551) | (SEQ ID | LY | NO: 1565) | NO: 1566) |
| | | | NO: | (SEQ ID | | |
| | | | 1552) | NO: | | |
| | | | | 1585) | | |
| V0024 | GYTFTRF | NPNNGG | GTGTGAM | RSSQSLV | RVSSRFS | FQGTHVPRT |
| | (SEQ ID | (SEQ ID | DY | HSNGNTH | (SEQ ID | (SEQ ID |
| | NO: 1593) | NO: 1551) | (SEQ ID | LY | NO: 1602) | NO: 1566) |
| | | | NO: | (SEQ ID | | |
| | | | 1552) | NO: | | |
| | | | | 1601) | | |
| V0052 | GFSLSTSA | YWDDD | RRRGYGM | KASQSVS | YASNRCT | QQDYRSPLT |
| | M | (SEQ ID | DY | NDVA | (SEQ ID | (SEQ ID |
| | (SEQ ID | NO: 1609) | (SEQ ID | (SEQ ID | NO: 1622) | NO: 1623) |
| | NO: 1608) | | NO: | NO: | | |
| | | | 1610) | 1621) | | |

TABLE 12
CDR sequences of selected antibodies based on IMGT numbering system

| Ab ID | HC CDR1 | HC CDR2 | HC CDR3 | LC CDR1 | LC CDR2 | LC CDR3 |
|---|---|---|---|---|---|---|
| V0004 | DYTFTNYW | IDPNSGGT | AGDFDV | GNIHNY | NAK | QHFWSTPLT |
| | (SEQ ID | (SEQ ID | (SEQ ID | (SEQ ID | (SEQ ID | (SEQ ID |
| | NO: 1505) | NO: 1506) | NO: 1507) | NO: | NO: 1518) | NO: 1516) |
| | | | | 1517) | | |
| V0009 | GFTFTDYY | IRNKAKGFT | VRDINY | QSLLYST | WAS | QQYYSYPRT |
| | (SEQ ID | T | (SEQ ID | NQENY | (SEQ ID | (SEQ ID |
| | NO: 1530) | (SEQ ID | NO: 1532) | (SEQ ID | NO: 1543) | NO: 1541) |
| | | NO: 1531) | | NO: | | |
| | | | | 1542) | | |
| V0022 | GFTFTRYW | INPNNGGT | ARGTGTGA | QSLVHNN | RVS | FQGTHVPRT |
| | (SEQ ID | (SEQ ID | MDY | GITY | (SEQ ID | (SEQ ID |
| | NO: 1555) | NO: 1556) | (SEQ ID | (SEQ ID | NO: 1569) | NO: 1566) |
| | | | NO: 1557) | NO: | | |
| | | | | 1568) | | |
| V0023 | GYTFTIFW | INPNNGGG | ARGTGTGA | QSLVHSN | RVS | FQGTHVPRT |
| | (SEQ ID | (SEQ ID | MDY | | (SEQ ID | (SEQ ID |
| | NO: 1578) | NO: 1579) | (SEQ ID | GITH | NO: 1569) | NO: 1566) |
| | | | NO: 1557) | (SEQ ID | | |
| | | | | NO: | | |
| | | | | 1586) | | |
| V0024 | GYTFTRFW | INPNNGGT | ARGTGTGA | QSLVHSN | RVS | FQGTHVPRT |
| | (SEQ ID | (SEQ ID | MDY | GNTH | (SEQ ID | (SEQ ID |
| | NO: 1596) | NO: 1556) | (SEQ ID | (SEQ ID | NO: 1569) | NO: 1566) |
| | | | NO: 1557) | NO: | | |
| | | | | 1603) | | |
| V0052 | GFSLSTSA | IYWDDDK | ARRRRGYG | QSVSND | YAS | QQDYRSPLT |
| | MG | (SEQ ID | MDY | (SEQ ID | (SEQ ID | (SEQ ID |
| | (SEQ ID | NO: 1614) | (SEQ ID | NO: | NO: 1625) | NO: 1623) |
| | NO: 1613) | | NO: 1615) | 1624) | | |

TABLE 13
Exemplary anti-tau antibodies

| | SEQ | | |
|---|---|---|---|
| | ID | | |
| Ab ID | NO | Description | Sequence |
| V0004 | 1500 | HC CDR1 | DYTFTNY |
| | | (Chothia) | |
| | 1501 | HC CDR2 | DPNSGG |
| | | (Chothia) | |
| | 1502 | HC CDR3 | DFDV |
| | | (Chothia) | |
| | 1503 | HC CDR1 | NYWMH |
| | | (Kabat) | |
| | 1504 | HC CDR2 | RIDPNSGGTRYNEKFKN |
| | | (Kabat) | |
| | 1502 | HC CDR3 | DFDV |
| | | (Kabat) | |
| | 1505 | HC CDR1 | DYTFTNYW |
| | | (IMGT) | |
| | 1506 | HC CDR2 | IDPNSGGT |
| | | (IMGT) | |
| | 1507 | HC CDR3 | AGDFDV |
| | | (IMGT) | |
| | 1508 | FR H1 | QVQLQQPGAELVKPGASVKLSCKAS |
| | | (corresponding to the | |
| | | Chothia CDR | |
| | | definition) | |
| | 1509 | FR H2 | WMHWVKQRPGRGLEWIGRI |
| | | (corresponding to the | |
| | | Chothia CDR | |
| | | definition) | |
| | 1510 | FR H3 | TRYNEKFKNKATLTVDKPSSTAYMHLSSLTSEDSAVYYC |
| | | (corresponding to the | AG |
| | | Chothia CDR | |
| | | definition) | |
| | 1511 | FR H4 | WGTGTTVTVSS |
| | | (corresponding to the | |
| | | Chothia CDR | |
| | | definition) | |
| | 1512 | VH | QVQLQQPGAELVKPGASVKLSCKASDYTFTNYWMHWVKQ |
| | | | RPGRGLEWIGRIDPNSGGTRYNEKFKNKATLTVDKPSST |
| | | | AYMHLSSLTSEDSAVYYCAGDFDVWGTGTTVTVSS |
| | 1513 | DNA VH | CAGGTCCAACTGCAGCAGCCTGGGGCTGAGCTTGTGAAG |
| | | | CCTGGGGCTTCAGTGAAGCTGTCCTGCAAGGCTTCTGAC |
| | | | TACACCTTCACCAACTACTGGATGCACTGGGTGAAGCAG |
| | | | AGGCCTGGACGAGGCCTTGAGTGGATAGGAAGGATTGAT |
| | | | CCTAATAGTGGTGGTACTAGGTACAATGAGAAGTTCAAG |
| | | | AACAAGGCCACACTGACTGTTGACAAACCCTCCAGCACA |
| | | | GCCTACATGCATCTCAGCAGCCTGACATCTGAGGACTCT |
| | | | GCGGTCTATTATTGTGCAGGGGACTTCGATGTCTGGGGC |
| | | | ACAGGGACCACGGTCACCGTCTCCTCA |
| | 1514 | LC CDR1 | RASGNIHNYLA |
| | | (Chothia) | |
| | 1515 | LC CDR2 | NAKTLPD |
| | | (Chothia) | |
| | 1516 | LC CDR3 | QHFWSTPLT |
| | | (Chothia) | |
| | 1514 | LC CDR1 | RASGNIHNYLA |
| | | (Kabat) | |
| | 1515 | LC CDR2 | NAKTLPD |
| | | (Kabat) | |
| | 1516 | LC CDR3 | QHFWSTPLT |
| | | (Kabat) | |
| | 1517 | LC CDR1 | GNIHNY |
| | | (IMGT) | |
| | 1518 | LC CDR2 | NAK |
| | | (IMGT) | |
| | 1516 | LC CDR3 | QHFWSTPLT |
| | | (IMGT) | |
| | 1519 | FR L1 | DIQMTQSPASLSASVGETVTITC |
| | | (corresponding to the | |
| | | Chothia CDR | |
| | | definition) | |
| | 1520 | FR L2 | WYQQRQGKSPQLLVY |
| | | (corresponding to the | |
| | | Chothia CDR | |
| | | definition) | |
| | 1521 | FR L3 | GVPSRFSGSGSGTQYSLKINSLQPEDFGSYCC |
| | | (corresponding to the | |
| | | Chothia CDR | |
| | | definition) | |
| | 1522 | FR L4 | FGAGTKLELK |
| | | (corresponding to the | |
| | | Chothia CDR | |
| | | definition) | |
| | 1523 | VL | DIQMTQSPASLSASVGETVTITCRASGNIHNYLAWYQQR |
| | | | QGKSPQLLVYNAKTLPDGVPSRFSGSGSGTQYSLKINSL |
| | | | QPEDFGSYCCQHFWSTPLTFGAGTKLELK |
| | 1524 | DNA VL | GACATCCAGATGACTCAGTCTCCAGCCTCCCTATCTGCA |
| | | | TCTGTGGGAGAAACTGTCACCATCACATGTCGAGCAAGT |
| | | | GGGAATATTCACAATTATTTAGCATGGTATCAGCAGAGA |
| | | | CAGGGAAAATCTCCTCAGCTCCTGGTCTATAATGCAAAA |
| | | | ACCTTACCAGATGGTGTGCCATCAAGGTTCAGTGGCAGT |
| | | | GGATCAGGAACACAATATTCTCTCAAGATCAACAGCCTG |
| | | | CAGCCTGAAGATTTTGGGAGTTATTGCTGTCAACATTTT |
| | | | TGGAGTACTCCGCTCACGTTCGGTGCTGGGACCAAGTTG |
| | | | GAGCTGAAA |
| V0009 | 1525 | HC CDR1 | GFTFTDY |
| | | (Chothia) | |
| | 1526 | HC CDR2 | RNKAKGFT |
| | | (Chothia) | |
| | 1527 | HC CDR3 | DINY |
| | | (Chothia) | |
| | 1528 | HC CDR1 | DYYMS |
| | | (Kabat) | |
| | 1529 | HC CDR2 | LIRNKAKGFTTEYSASVKG |
| | | (Kabat) | |
| | 1527 | HC CDR3 | DINY |
| | | (Kabat) | |
| | 1530 | HC CDR1 | GFTFTDYY |
| | | (IMGT) | |
| | 1531 | HC CDR2 | IRNKAKGFTT |
| | | (IMGT) | |
| | 1532 | HC CDR3 | VRDINY |
| | | (IMGT) | |
| | 1533 | FR H1 | EVQLVESGGALVQPGGSLSLSCAAS |
| | | (corresponding to the | |
| | | Chothia CDR | |
| | | definition) | |
| | 1534 | FR H2 | YMSWVRQPPGKALEWLALI |
| | | (corresponding to the | |
| | | Chothia CDR | |
| | | definition) | |
| | 1535 | FR H3 | TEYSASVKGRFTISRDNSQSILLFQMNDLRADDSATYYC |
| | | (corresponding to the | VR |
| | | Chothia CDR | |
| | | definition) | |
| | 1536 | FR H4 | WGQGTTLTVSS |
| | | (corresponding to the | |
| | | Chothia CDR | |
| | | definition) | |
| | 1537 | VH | EVQLVESGGALVQPGGSLSLSCAASGFTFTDYYMSWVRQ |
| | | | PPGKALEWLALIRNKAKGFTTEYSASVKGRFTISRDNSQ |
| | | | SILLFQMNDLRADDSATYYCVRDINYWGQGTTLTVSS |
| | 1538 | DNA VH | GAGGTGCAGCTGGTGGAGTCTGGAGGAGCCTTGGTACAG |
| | | | CCTGGGGGTTCTCTGAGTCTCTCCTGTGCAGCTTCTGGA |
| | | | TTCACCTTCACTGATTACTACATGAGCTGGGTCCGCCAG |
| | | | CCTCCAGGGAAGGCACTTGAGTGGCTGGCTTTGATTAGA |
| | | | AACAAAGCTAAAGGTTTCACAACAGAATACAGTGCATCT |
| | | | GTGAAGGGTCGGTTCACCATCTCCAGAGATAATTCCCAA |
| | | | AGCATCCTCCTTTTTCAAATGAATGACCTGAGAGCTGAC |
| | | | GACAGTGCCACTTATTACTGTGTAAGAGATATAAACTAC |
| | | | TGGGGCCAAGGCACCACTCTCACAGTCTCCTCA |
| | 1539 | LC CDR1 | KSSQSLLYSTNQENYLA |
| | | (Chothia) | |
| | 1540 | LC CDR2 | WASSRES |
| | | (Chothia) | |
| | 1541 | LC CDR3 | QQYYSYPRT |
| | | (Chothia) | |
| | 1539 | LC CDR1 | KSSQSLLYSTNQENYLA |
| | | (Kabat) | |
| | 1540 | LC CDR2 | WASSRES |
| | | (Kabat) | |
| | 1541 | LC CDR3 | QQYYSYPRT |
| | | (Kabat) | |
| | 1542 | LC CDR1 | QSLLYSTNQENY |
| | | (IMGT) | |
| | 1543 | LC CDR2 | WAS |
| | | (IMGT) | |
| | 1541 | LC CDR3 | QQYYSYPRT |
| | | (IMGT) | |
| | 1544 | FR L1 | DIVMSQSPSSLAVSVGEKVTMSC |
| | | (corresponding to the | |
| | | Chothia CDR | |
| | | definition) | |
| | 1545 | FR L2 | WYQQKPGQSPKLLIY |
| | | (corresponding to the | |
| | | Chothia CDR | |
| | | definition) | |
| | 1546 | FR L3 | GVPDRFTGSGSGTDFTLTISSVKAEDLAVYYC |
| | | (corresponding to the | |
| | | Chothia CDR | |
| | | definition) | |
| | 1547 | FR L4 | FGGGTKLEIK |
| | | (corresponding to the | |
| | | Chothia CDR | |
| | | definition) | |
| | 1548 | VL | DIVMSQSPSSLAVSVGEKVTMSCKSSQSLLYSTNQENYL |
| | | | AWYQQKPGQSPKLLIYWASSRESGVPDRFTGSGSGTDFT |
| | | | LTISSVKAEDLAVYYCQQYYSYPRTFGGGTKLEIK |
| | 1549 | DNA VL | GACATTGTGATGTCACAGTCTCCATCCTCCCTAGCTGTG |
| | | | TCAGTTGGAGAGAAGGTTACTATGAGCTGCAAGTCCAGT |
| | | | CAGAGCCTTTTATATAGTACCAATCAAGAGAACTACTTG |
| | | | GCCTGGTACCAGCAGAAACCAGGGCAGTCTCCTAAACTG |
| | | | CTGATTTACTGGGCATCCTCTAGGGAATCTGGGGTCCCT |
| | | | GATCGCTTTACAGGCAGTGGATCTGGGACAGATTTCACT |
| | | | CTCACCATCAGCAGTGTGAAGGCTGAAGACCTGGCAGTT |
| | | | TATTACTGTCAGCAATATTATAGCTATCCTCGGACGTTC |
| | | | GGTGGAGGCACCAAGCTGGAAATCAAA |
| V0022 | 1550 | HC CDR1 | GFTFTRY |
| | | (Chothia) | |
| | 1551 | HC CDR2 | NPNNGG |
| | | (Chothia) | |
| | 1552 | HC CDR3 | GTGTGAMDY |
| | | (Chothia) | |
| | 1553 | HC CDR1 | RYWMH |
| | | (Kabat) | |
| | 1554 | HC CDR2 | NINPNNGGTDFNEKFKN |
| | | (Kabat) | |
| | 1552 | HC CDR3 | GTGTGAMDY |
| | | (Kabat) | |
| | 1555 | HC CDR1 | GFTFTRYW |
| | | (IMGT) | |
| | 1556 | HC CDR2 | INPNNGGT |
| | | (IMGT) | |
| | 1557 | HC CDR3 | ARGTGTGAMDY |
| | | (IMGT) | |
| | 1558 | FR H1 | QVQLQQPGTELVKPGSSVNLSCKAS |
| | | (corresponding to the | |
| | | Chothia CDR | |
| | | definition) | |
| | 1559 | FR H2 | WMHWVKERPGHGLEWIGNI |
| | | (corresponding to the | |
| | | Chothia CDR | |
| | | definition) | |
| | 1560 | FR H3 | TDFNEKFKNKATLTVHKSSTTVFIQLSSLISEDSAVYYC |
| | | (corresponding to the | AR |
| | | Chothia CDR | |
| | | definition) | |
| | 1561 | FR H4 | WGQGTSVTVSS |
| | | (corresponding to the | |
| | | Chothia CDR | |
| | | definition) | |
| | 1562 | VH | QVQLQQPGTELVKPGSSVNLSCKASGFTFTRYWMHWVKE |
| | | | RPGHGLEWIGNINPNNGGTDFNEKFKNKATLTVHKSSTT |
| | | | VFIQLSSLTSEDSAVYYCARGTGTGAMDYWGQGTSVTVS |
| | | | S |
| | 1563 | DNA VH | CAGGTCCAACTGCAGCAGCCTGGGACTGAACTGGTGAAG |
| | | | CCTGGGTCTTCAGTGAACCTGTCCTGCAAGGCTTCTGGC |
| | | | TTCACCTTCACCAGGTACTGGATGCACTGGGTGAAGGAG |
| | | | AGGCCTGGACATGGCCTTGAGTGGATTGGAAATATTAAT |
| | | | CCTAACAATGGTGGTACTGACTTCAATGAGAAGTTCAAG |
| | | | AACAAGGCCACACTGACTGTACACAAGTCCTCCACCACA |
| | | | GTCTTCATCCAACTCAGCAGCCTGACATCTGAGGACTCT |
| | | | GCGGTCTATTATTGTGCAAGAGGAACTGGGACGGGAGCT |
| | | | ATGGACTACTGGGGTCAAGGAACCTCAGTCACCGTCTCC |
| | | | TCA |
| | 1564 | LC CDR1 | RSSQSLVHNNGITYLY |
| | | (Chothia) | |
| | 1565 | LC CDR2 | RVSNRFS |
| | | (Chothia) | |
| | 1566 | LC CDR3 | FQGTHVPRT |
| | | (Chothia) | |
| | 1567 | LC CDR1 | RSSQSLVHNNGITYLY |
| | | (Kabat) | |
| | 1565 | LC CDR2 | RVSNRFS |
| | | (Kabat) | |
| | 1566 | LC CDR3 | FQGTHVPRT |
| | | (Kabat) | |
| | 1568 | LC CDR1 | QSLVHNNGITY |
| | | (IMGT) | |
| | 1569 | LC CDR2 | RVS |
| | | (IMGT) | |
| | 1566 | LC CDR3 | FQGTHVPRT |
| | | (IMGT) | |
| | 1570 | FR L1 | DVVMTQTPLSLPVSLGDQASISC |
| | | (corresponding to the | |
| | | Chothia CDR | |
| | | definition) | |
| | 1571 | FR L2 | WYLQKPGQSPKLLIY |
| | | (corresponding to the | |
| | | Chothia CDR | |
| | | definition) | |
| | 1572 | FR L3 | GVPDRFGGSGSGTDFTLKISRVEAEDLGVYFC |
| | | (corresponding to the | |
| | | Chothia CDR | |
| | | definition) | |
| | 1547 | FR L4 | FGGGTKLEIK |
| | | (corresponding to the | |
| | | Chothia CDR | |
| | | definition) | |
| | 1573 | VL | DVVMTQTPLSLPVSLGDQASISCRSSQSLVHNNGITYLY |
| | | | WYLQKPGQSPKLLIYRVSNRFSGVPDRFGGSGSGTDFTL |
| | | | KISRVEAEDLGVYFCFQGTHVPRTFGGGTKLEIK |
| | 1574 | DNA VL | GATGTTGTGATGACCCAAACTCCACTCTCCCTGCCTGTC |
| | | | AGTCTTGGAGATCAAGCTTCCATCTCTTGCAGATCTAGT |
| | | | CAGAGCCTTGTACACAACAATGGAATCACCTATTTATAT |
| | | | TGGTACCTGCAGAAGCCAGGCCAGTCTCCAAAGCTCCTG |
| | | | ATCTACAGGGTTTCCAACCGATTTTCTGGGGTCCCAGAC |
| | | | AGGTTCGGTGGCAGTGGATCAGGGACAGATTTCACACTC |
| | | | AAGATCAGCAGAGTGGAGGCTGAGGATCTGGGAGTTTAT |
| | | | TTCTGCTTTCAAGGTACACATGTTCCTCGGACGTTCGGT |
| | | | GGAGGCACCAAGCTGGAAATCAAA |
| V0023 | 1575 | HC CDR1 | GYTFTIF |
| | | (Chothia) | |
| | 1551 | HC CDR2 | NPNNGG |
| | | (Chothia) | |
| | 1552 | HC CDR3 | GTGTGAMDY |
| | | (Chothia) | |
| | 1576 | HC CDR1 | IFWMH |
| | | (Kabat) | |
| | 1577 | HC CDR2 | KINPNNGGGDYNEKFKS |
| | | (Kabat) | |
| | 1552 | HC CDR3 | GTGTGAMDY |
| | | (Kabat) | |
| | 1578 | HC CDR1 | GYTFTIFW |
| | | (IMGT) | |
| | 1579 | HC CDR2 | INPNNGGG |
| | | (IMGT) | |
| | 1557 | HC CDR3 | ARGTGTGAMDY |
| | | (IMGT) | |
| | 1580 | FR H1 | QVQLQQPGTELVKPGASVKLSCKAS |
| | | (corresponding to the | |
| | | Chothia CDR | |
| | | definition) | |
| | 1581 | FR H2 | WMHWVKQRPGHGLEWIGKI |
| | | (corresponding to the | |
| | | Chothia CDR | |
| | | definition) | |
| | 1582 | FR H3 | GDYNEKFKSKATLTVDKSSTTAYLQLSSLISEDSAVYYC |
| | | (corresponding to the | AR |
| | | Chothia CDR | |
| | | definition) | |
| | 1561 | FR H4 | WGQGTSVTVSS |
| | | (corresponding to the | |
| | | Chothia CDR | |
| | | definition) | |
| | 1583 | VH | QVQLQQPGTELVKPGASVKLSCKASGYTFTIFWMHWVKQ |
| | | | RPGHGLEWIGKINPNNGGGDYNEKFKSKATLTVDKSSTT |
| | | | AYLQLSSLTSEDSAVYYCARGTGTGAMDYWGQGTSVTVS |
| | | | S |
| | 1584 | DNA VH | CAGGTCCAACTGCAGCAGCCTGGGACTGAACTGGTGAAG |
| | | | CCTGGGGCTTCAGTGAAGCTGTCCTGCAAGGCTTCTGGC |
| | | | TACACCTTCACCATCTTCTGGATGCACTGGGTGAAGCAG |
| | | | AGGCCTGGACATGGCCTTGAGTGGATTGGAAAGATTAAT |
| | | | CCTAACAATGGAGGTGGTGACTACAATGAGAAATTCAAG |
| | | | AGTAAGGCCACATTGACTGTAGACAAATCCTCCACCACA |
| | | | GCCTACTTGCAGCTCAGCAGCCTGACATCTGAGGACTCT |
| | | | GCGGTCTATTATTGTGCAAGAGGAACTGGGACGGGAGCT |
| | | | ATGGACTACTGGGGTCAAGGAACCTCAGTCACCGTCTCC |
| | | | TCA |
| | 1585 | LC CDR 1 | RSSQSLVHSNGITHLY |
| | | (Chothia) | |
| | 1565 | LC CDR2 | RVSNRFS |
| | | (Chothia) | |
| | 1566 | LC CDR3 | FQGTHVPRT |
| | | (Chothia) | |
| | 1585 | LC CDR1 | RSSQSLVHSNGITHLY |
| | | (Kabat) | |
| | 1565 | LC CDR2 | RVSNRFS |
| | | (Kabat) | |
| | 1566 | LC CDR3 | FQGTHVPRT |
| | | (Kabat) | |
| | 1586 | LC CDR1 | QSLVHSNGITH |
| | | (IMGT) | |
| | 1569 | LC CDR2 | RVS |
| | | (IMGT) | |
| | 1566 | LC CDR3 | FQGTHVPRT |
| | | (IMGT) | |
| | 1587 | FR L1 | DVVMTQTPLSLPVSLGDHASISC |
| | | (corresponding to the | |
| | | Chothia CDR | |
| | | definition) | |
| | 1588 | FR L2 | WYLQRPGQTPKLLIY |
| | | (corresponding to the | |
| | | Chothia CDR | |
| | | definition) | |
| | 1589 | FR L3 | GVPDRFSGSGSGTDFTLKISSVEAEDLGVYFC |
| | | (corresponding to the | |
| | | Chothia CDR | |
| | | definition) | |
| | 1590 | FR L4 | FGGGTKLEIE |
| | | (corresponding to the | |
| | | Chothia CDR | |
| | | definition) | |
| | 1591 | VL | DVVMTQTPLSLPVSLGDHASISCRSSQSLVHSNGITHLY |
| | | | WYLQRPGQTPKLLIYRVSNRFSGVPDRFSGSGSGTDFTL |
| | | | KISSVEAEDLGVYFCFQGTHVPRTFGGGTKLEIE |
| | 1592 | DNA VL | GATGTTGTGATGACCCAAACTCCACTCTCCCTGCCTGTC |
| | | | AGTCTTGGAGATCACGCTTCCATCTCTTGCAGATCTAGT |
| | | | CAGAGCCTTGTACACAGCAATGGAATCACCCATTTATAT |
| | | | TGGTACCTGCAGAGGCCAGGCCAGACTCCAAAGCTCCTG |
| | | | ATCTACAGGGTTTCCAACCGATTTTCTGGGGTCCCAGAC |
| | | | AGGTTCAGTGGCAGTGGATCAGGGACAGATTTCACACTC |
| | | | AAGATCAGCAGCGTGGAGGCTGAGGATCTGGGAGTTTAT |
| | | | TTCTGCTTTCAAGGTACACATGTTCCTCGGACGTTCGGT |
| | | | GGAGGCACCAAGCTGGAAATCGAA |
| V0024 | 1593 | HC CDR1 | GYTFTRF |
| | | (Chothia) | |
| | 1551 | HC CDR2 | NPNNGG |
| | | (Chothia) | |
| | 1552 | HC CDR3 | GTGTGAMDY |
| | | (Chothia) | |
| | 1594 | HC CDR1 | RFWMH |
| | | (Kabat) | |
| | 1595 | HC CDR2 | NINPNNGGTDNNERFKS |
| | | (Kabat) | |
| | 1552 | HC CDR3 | GTGTGAMDY |
| | | (Kabat) | |
| | 1596 | HC CDR1 | GYTFTRFW |
| | | (IMGT) | |
| | 1556 | HC CDR2 | INPNNGGT |
| | | (IMGT) | |
| | 1557 | HC CDR3 | ARGTGTGAMDY |
| | | (IMGT) | |
| | 1580 | FR H1 | QVQLQQPGTELVKPGASVKLSCKAS |
| | | (corresponding to the | |
| | | Chothia CDR | |
| | | definition) | |
| | 1597 | FR H2 | WMHWVKQRPGQGLEWIGNI |
| | | (corresponding to the | |
| | | Chothia CDR | |
| | | definition) | |
| | 1598 | FR H3 | TDNNERFKSKATLTVDRSSSTAYMQLSSLTSEDSAVYYC |
| | | (corresponding to the | AR |
| | | Chothia CDR | |
| | | definition) | |
| | 1561 | FR H4 | WGQGTSVTVSS |
| | | (corresponding to the | |
| | | Chothia CDR | |
| | | definition) | |
| | 1599 | VH | QVQLQQPGTELVKPGASVKLSCKASGYTFTRFWMHWVKQ |
| | | | RPGQGLEWIGNINPNNGGTDNNERFKSKATLTVDRSSST |
| | | | AYMQLSSLTSEDSAVYYCARGTGTGAMDYWGQGTSVTVS |
| | | | S |
| | 1600 | DNA VH | CAGGTCCAACTGCAGCAGCCTGGGACTGAACTGGTGAAG |
| | | | CCTGGGGCTTCAGTGAAGCTGTCCTGCAAGGCTTCTGGC |
| | | | TACACCTTCACCAGGTTCTGGATGCACTGGGTGAAGCAG |
| | | | AGGCCTGGACAAGGCCTTGAGTGGATTGGAAATATTAAT |
| | | | CCTAACAATGGTGGTACTGACAATAATGAGAGGTTCAAG |
| | | | AGCAAGGCCACACTGACTGTAGACAGATCCTCCAGCACA |
| | | | GCCTACATGCAGCTCAGCAGCCTGACATCTGAGGACTCT |
| | | | GCGGTCTATTATTGTGCAAGAGGAACTGGGACGGGAGCT |
| | | | ATGGACTACTGGGGTCAAGGAACCTCAGTCACCGTCTCC |
| | | | TCA |
| | 1601 | LC CDR 1 | RSSQSLVHSNGNTHLY |
| | | (Chothia) | |
| | 1602 | LC CDR2 | RVSSRFS |
| | | (Chothia) | |
| | 1566 | LC CDR3 | FQGTHVPRT |
| | | (Chothia) | |
| | 1601 | LC CDR1 | RSSQSLVHSNGNTHLY |
| | | (Kabat) | |
| | 1602 | LC CDR2 | RVSSRFS |
| | | (Kabat) | |
| | 1566 | LC CDR3 | FQGTHVPRT |
| | | (Kabat) | |
| | 1603 | LC CDR1 | QSLVHSNGNTH |
| | | (IMGT) | |
| | 1569 | LC CDR2 | RVS |
| | | (IMGT) | |
| | 1566 | LC CDR3 | FQGTHVPRT |
| | | (IMGT) | |
| | 1604 | FR L1 | DVVMTQTPLSLPVSLGDQASISC |
| | | (corresponding to the | |
| | | Chothia CDR | |
| | | definition) | |
| | 1571 | FR L2 | WYLQKPGQSPKLLIY |
| | | (corresponding to the | |
| | | Chothia CDR | |
| | | definition) | |
| | 1605 | FR L3 | GVPDRFSGSGSGTDFTLKISRVEAEDLGVYFC |
| | | (corresponding to the | |
| | | Chothia CDR | |
| | | definition) | |
| | 1547 | FR L4 | FGGGTKLEIK |
| | | (corresponding to the | |
| | | Chothia CDR | |
| | | definition) | |
| | 1606 | VL | DVVMTQTPLSLPVSLGDQASISCRSSQSLVHSNGNTHLY |
| | | | WYLQKPGQSPKLLIYRVSSRFSGVPDRFSGSGSGTDFTL |
| | | | KISRVEAEDLGVYFCFQGTHVPRTFGGGTKLEIK |
| | 1607 | DNA VL | GATGTGGTGATGACCCAAACTCCACTCTCCCTGCCTGTC |
| | | | AGTCTTGGAGATCAGGCTTCCATCTCTTGCAGATCTAGT |
| | | | CAGAGCCTTGTACACAGCAATGGAAACACCCATTTATAT |
| | | | TGGTACCTGCAGAAGCCAGGCCAGTCTCCAAAGCTCCTG |
| | | | ATCTACAGGGTTTCCAGCCGATTTTCTGGGGTCCCAGAC |
| | | | AGGTTCAGTGGCAGTGGATCAGGGACAGATTTCACACTC |
| | | | AAGATCAGCAGAGTGGAGGCTGAGGATCTGGGAGTTTAT |
| | | | TTCTGCTTTCAGGGTACACATGTTCCTCGGACGTTCGGT |
| | | | GGAGGCACCAAGCTGGAAATCAAA |
| V0052 | 1608 | HC CDR1 | GFSLSTSAM |
| | | (Chothia) | |
| | 1609 | HC CDR2 | YWDDD |
| | | (Chothia) | |
| | 1610 | HC CDR3 | RRRGYGMDY |
| | | (Chothia) | |
| | 1611 | HC CDR1 | TSAMGVS |
| | | (Kabat) | |
| | 1612 | HC CDR2 | HIYWDDDKRYNPSLKS |
| | | (Kabat) | |
| | 1610 | HC CDR3 | RRRGYGMDY |
| | | (Kabat) | |
| | 1613 | HC CDR1 | GFSLSTSAMG |
| | | (IMGT) | |
| | 1614 | HC CDR2 | IYWDDDK |
| | | (IMGT) | |
| | 1615 | HC CDR3 | ARRRRGYGMDY |
| | | (IMGT) | |
| | 1616 | FR H1 | QITLKESGPGILQSSQTLSLTCSFS |
| | | (corresponding to the | |
| | | Chothia CDR | |
| | | definition) | |
| | 1617 | FR H2 | GVSWIRQPSGEGLEWLAHI |
| | | (corresponding to the | |
| | | Chothia CDR | |
| | | definition) | |
| | 1618 | FR H3 | KRYNPSLKSRLTISKDTSRNQVFLKITSVDTADTATYYC |
| | | (corresponding to the | AR |
| | | Chothia CDR | |
| | | definition) | |
| | 1561 | FR H4 | WGQGTSVTVSS |
| | | (corresponding to the | |
| | | Chothia CDR | |
| | | definition) | |
| | 1619 | VH | QITLKESGPGILQSSQTLSLTCSFSGFSLSTSAMGVSWI |
| | | | RQPSGEGLEWLAHIYWDDDKRYNPSLKSRLTISKDTSRN |
| | | | QVFLKITSVDTADTATYYCARRRRGYGMDYWGQGTSVTV |
| | | | SS |
| | 1620 | DNA VH | CAGATTACTCTGAAAGAGTCTGGCCCTGGGATATTGCAG |
| | | | TCCTCCCAGACCCTCAGTCTGACTTGTTCTTTCTCTGGG |
| | | | TTTTCACTGAGCACTTCTGCTATGGGTGTGAGTTGGATT |
| | | | CGTCAGCCTTCAGGAGAGGGTCTGGAGTGGCTGGCACAC |
| | | | ATTTACTGGGATGATGACAAGCGCTATAACCCATCCCTG |
| | | | AAGAGCCGGCTCACAATCTCCAAGGATACCTCCAGAAAC |
| | | | CAGGTATTCCTCAAGATCACCAGTGTGGACACTGCAGAT |
| | | | ACTGCCACATACTACTGTGCTCGAAGAAGGAGGGGGTAT |
| | | | GGTATGGACTACTGGGGTCAAGGAACCTCAGTCACCGTC |
| | | | TCCTCA |
| | 1621 | LC CDR 1 | KASQSVSNDVA |
| | | (Chothia) | |
| | 1622 | LC CDR2 | YASNRCT |
| | | (Chothia) | |
| | 1623 | LC CDR3 | QQDYRSPLT |
| | | (Chothia) | |
| | 1621 | LC CDR1 | KASQSVSNDVA |
| | | (Kabat) | |
| | 1622 | LC CDR2 | YASNRCT |
| | | (Kabat) | |
| | 1623 | LC CDR3 | QQDYRSPLT |
| | | (Kabat) | |
| | 1624 | LC CDR1 | QSVSND |
| | | (IMGT) | |
| | 1625 | LC CDR2 | YAS |
| | | (IMGT) | |
| | 1623 | LC CDR3 | QQDYRSPLT |
| | | (IMGT) | |
| | 1626 | FR L1 | SIVMTQTPKFLLVSAGDRVTITC |
| | | (corresponding to the | |
| | | Chothia CDR | |
| | | definition) | |
| | 1545 | FR L2 | WYQQKPGQSPKLLIY |
| | | (corresponding to the | |
| | | Chothia CDR | |
| | | definition) | |
| | 1627 | FR L3 | GVPDRFTGSGYGTDFTFTISTVQAEDLAVYFC |
| | | (corresponding to the | |
| | | Chothia CDR | |
| | | definition) | |
| | 1628 | FR L4 | FGAGTKLELK |
| | | (corresponding to the | |
| | | Chothia CDR | |
| | | definition) | |
| | 1629 | VL | SIVMTQTPKFLLVSAGDRVTITCKASQSVSNDVAWYQQK |
| | | | PGQSPKLLIYYASNRCTGVPDRFTGSGYGTDFTFTISTV |
| | | | QAEDLAVYFCQQDYRSPLIFGAGTKLELK |
| | 1630 | DNA VL | AGTATTGTGATGACCCAGACTCCCAAATTCCTGCTTGTA |
| | | | TCAGCAGGAGACAGGGTTACCATAACCTGCAAGGCCAGT |
| | | | CAGAGTGTGAGTAATGATGTAGCTTGGTACCAACAGAAG |
| | | | CCAGGGCAGTCTCCTAAACTGCTAATATACTATGCATCC |
| | | | AATCGCTGCACTGGAGTCCCTGATCGCTTCACTGGCAGT |
| | | | GGATATGGGACGGATTTCACTTTCACCATCAGCACTGTA |
| | | | CAGGCTGAAGACCTGGCAGTTTATTTCTGTCAGCAGGAT |
| | | | TATAGGTCTCCGCTCACGTTCGGTGCTGGGACCAAGCTG |
| | | | GAGCTGAAA |

TABLE 14
Exemplary anti-tau antibodies

| Ab ID | SEQ ID | Description | Sequence |
|---|---|---|---|
| VY011 | 2200 | HCDR1 | GGSISNYY |
| | 2201 | HCDR2 | VYTSGSA |
| | 2202 | HCDR3 | ARDRGLYY |
| | 2203 | FR H1 | QVQLQESGPGLVKPSETLSLTCTVS |
| | 2204 | FR H2 | WTWIRQPAGKGLEWIGR |
| | 2205 | FR H3 | NYNPSLKSRVTMSVDTSKNQFSLTLSSVTAADTAVYYC |
| | 2206 | FR H4 | WGQGTLVTVSS |
| | 2207 | LCDR1 | QSLVHSDGNTY |
| | 2208 | LCDR2 | KIS |
| | 2209 | LCDR3 | MQATQFPLT |
| | 2210 | FR L1 | DIVMTQTPLSSLVILGQPASISCRSS |
| | 2211 | FR L2 | LSWLQQRPGQPPRLLIY |
| | 2212 | FR L3 | KRFFGVPDRFSGSGAGTDFTLKINRVEAEDVGIYYC |
| | 2213 | FR L4 | FGGGTKVEIK |
| | 2214 | VH | QVQLQESGPGLVKPSETLSLTCTVSGGSISNYYWTWIRQPA |
| | | | GKGLEWIGRVYTSGSANYNPSLKSRVTMSVDTSKNQFSLTL |
| | | | SSVTAADTAVYYCARDRGLYYWGQGTLVTVSS |
| | 2215 | VL | DIVMTQTPLSSLVTLGQPASISCRSSQSLVHSDGNTYLSWL |
| | | | QQRPGQPPRLLIYKISKRFFGVPDRFSGSGAGTDFTLKINR |
| | | | VEAEDVGIYYCMQATQFPLTFGGGTKVEIK |
| | 2216 | VH (DNA) | CAGGTGCAGCTGCAGGAGTCGGGCCCAGGACTGGTGAAGCC |
| | | | TTCGGAGACCCTGTCCCTCACCTGCACTGTCTCTGGTGGCT |
| | | | CCATCAGTAATTACTACTGGACCTGGATCCGGCAGCCCGCC |
| | | | GGGAAGGGACTGGAGTGGATTGGGCGTGTCTATACCAGTGG |
| | | | GAGCGCCAACTACAACCCCTCCCTCAAGAGTCGAGTTACCA |
| | | | TGTCAGTAGACACGTCCAAGAACCAGTTCTCCCTGACGCTG |
| | | | AGCTCTGTGACCGCCGCGGACACGGCCGTGTATTACTGTGC |
| | | | GAGAGATAGAGGACTCTACTACTGGGGCCAGGGAACCCTGG |
| | | | TCACCGTCTCCTCA |
| | 2217 | VL (DNA) | GATATTGTGATGACCCAGACTCCACTCTCCTCACTTGTCAC |
| | | | CCTTGGACAGCCGGCCTCCATCTCCTGCAGGTCTAGTCAAA |
| | | | GCCTCGTACACAGTGATGGAAACACCTATTTGAGTTGGCTT |
| | | | CAGCAGAGGCCAGGCCAGCCTCCAAGACTCCTAATTTATAA |
| | | | GATTTCTAAGCGGTTCTTTGGGGTCCCAGACAGATTCAGTG |
| | | | GCAGTGGGGCAGGGACAGATTTCACACTGAAAATCAACAGG |
| | | | GTGGAAGCTGAGGATGTCGGGATTTATTACTGCATGCAAGC |
| | | | TACACAATTTCCGCTCACTTTCGGCGGAGGGACCAAGGTGG |
| | | | AGATCAAA |
| VY007 | 2218 | HCDR1 | RFTFSNYN |
| | 2219 | HCDR2 | ISSSSSTI |
| | 2220 | HCDR3 | ASLGRGY |
| | 2221 | FR H1 | [sequence omitted] |
| | 2222 | FR H2 | MNWVRQAPGKGLEWISY |
| | 2223 | FR H3 | YYADSVKGRFTISRDNAKNSLSLQMNSLRDEDTAVYYC |
| | 2206 | FR H4 | WGQGTLVTVSS |
| | 2207 | LCDR1 | QSLVHSDGNTY |
| | 2208 | LCDR2 | KIS |
| | 2224 | LCDR3 | MQATQFPRT |
| | 2225 | FR L1 | DIVMTQTPLSSPVTLGQPASISCRSS |
| | 2211 | FR L2 | LSWLQQRPGQPPRLLIY |
| | 2226 | FR L3 | NRFSGVPDRFSGSGAGTDFTLKISRVEAEDVGVYYC |
| | 2227 | FR L4 | FGQGSKLEIK |
| | 2228 | VH | EVQLVESGGGLVQPGGSLRLSCAASRFTFSNYNMNWVRQAP |
| | | | GKGLEWISYISSSSSTIYYADSVKGRFTISRDNAKNSLSLQ |
| | | | MNSLRDEDTAVYYCASLGRGYWGQGTLVTVSS |
| | 2229 | VL | DIVMTQTPLSSPVTLGQPASISCRSSQSLVHSDGNTYLSWL |
| | | | QQRPGQPPRLLIYKISNRFSGVPDRFSGSGAGTDFTLKISR |
| | | | VEAEDVGVYYCMQATQFPRTFGQGSKLEIK |
| | 2230 | VH (DNA) | GAGGTGCAGCTGGTGGAGTCTGGGGGAGGCTTGGTACAGCC |
| | | | TGGGGGGTCCCTGAGACTCTCCTGTGCAGCCTCTAGATTCA |
| | | | CCTTCAGTAACTATAACATGAACTGGGTCCGCCAGGCTCCA |
| | | | GGGAAGGGGCTGGAGTGGATTTCATACATTAGTAGTAGTAG |
| | | | TAGTACCATATACTACGCAGACTCTGTGAAGGGCCGATTCA |
| | | | CCATCTCCAGAGACAATGCCAAGAACTCACTGTCTCTGCAA |
| | | | ATGAACAGCCTGAGAGACGAGGACACGGCTGTGTATTACTG |
| | | | TGCGAGTCTGGGGAGGGGCTACTGGGGCCAGGGAACCCTGG |
| | | | TCACCGTCTCCTCA |
| | 2231 | VL (DNA) | GATATTGTGATGACCCAGACTCCACTCTCCTCACCTGTCAC |
| | | | CCTTGGACAGCCGGCCTCCATCTCCTGCAGGTCTAGTCAAA |
| | | | GCCTCGTACACAGTGATGGAAACACCTACTTGAGTTGGCTT |
| | | | CAGCAGAGGCCAGGCCAGCCTCCAAGACTCCTAATTTATAA |
| | | | GATTTCTAACCGGTTCTCTGGGGTCCCAGACAGATTCAGTG |
| | | | GCAGTGGGGCAGGGACAGATTTCACACTGAAAATCAGCAGG |
| | | | GTGGAAGCTGAGGATGTCGGGGTTTATTATTGTATGCAAGC |
| | | | TACTCAATTTCCTCGCACTTTTGGCCAGGGGTCCAAGCTGG |
| | | | AGATCAAA |
| VY004 | 2232 | HCDR1 | GFTFSDYS |
| | 2233 | HCDR2 | IRSSSSII |
| | 2234 | HCDR3 | ARRGHFDY |
| | 2235 | FR H1 | EVQLVESGGGLVQAGGSLRLSCAAS |
| | 2236 | FR H2 | MNWVRQAPGKGLEWVSY |
| | 2237 | FR H3 | YYADSVKGRFTISRDNAKNSLHLQMNSLRDEDTAVYYC |
| | 2206 | FR H4 | WGQGTLVTVSS |
| | 2238 | LCDR1 | QSVSDY |
| | 2239 | LCDR2 | DVS |
| | 2240 | LCDR3 | QQRSNWPLT |
| | 2241 | FR L1 | EIVLIQSPATLSLSPGERAILSCRAS |
| | 2242 | FR L2 | LAWYQQKPGQAPRLFIY |
| | 2243 | FR L3 | KRATGIPARFSGSGSGTDFTLTISSLEPEDFAVYYC |
| | 2213 | FR L4 | FGGGTKVEIK |
| | 2244 | VH | EVQLVESGGGLVQAGGSLRLSCAASGFTFSDYSMNWVRQAP |
| | | | GKGLEWVSYIRSSSSIIYYADSVKGRFTISRDNAKNSLHLQ |
| | | | MNSLRDEDTAVYYCARRGHFDYWGQGTLVTVSS |
| | 2245 | VL | EIVLTQSPATLSLSPGERATLSCRASQSVSDYLAWYQQKPG |
| | | | QAPRLFIYDVSKRATGIPARFSGSGSGTDFTLTISSLEPED |
| | | | FAVYYCQQRSNWPLTFGGGTKVEIK |
| | 2246 | VH (DNA) | GAGGTGCAGCTGGTGGAGTCTGGGGGAGGCTTGGTACAGGC |
| | | | TGGGGGGTCCCTGAGACTCTCCTGTGCAGCCTCTGGATTCA |
| | | | CCTTCAGTGACTATAGCATGAACTGGGTCCGCCAGGCTCCA |
| | | | GGGAAGGGGCTGGAGTGGGTTTCATATATTAGGAGTAGTAG |
| | | | TAGTATCATATACTACGCAGACTCTGTGAAGGGCCGATTCA |
| | | | CCATCTCCAGAGACAATGCCAAGAACTCACTGCATTTGCAA |
| | | | ATGAACAGCCTGAGAGACGAGGACACGGCTGTGTATTACTG |
| | | | TGCGAGACGGGGTCACTTTGACTACTGGGGCCAGGGAACCC |
| | | | TGGTCACCGTCTCCTCA |
| | 2247 | VL (DNA) | GAAATTGTGTTGACACAGTCTCCAGCCACCCTGTCTTTGTC |
| | | | TCCAGGGGAAAGAGCCACCCTCTCCTGCAGGGCCAGTCAGA |
| | | | GTGTTAGCGACTACTTAGCCTGGTACCAACAGAAACCTGGC |
| | | | CAGGCTCCCAGGCTCTTCATCTATGATGTATCCAAGAGGGC |
| | | | CACTGGCATCCCAGCCAGGTTCAGTGGCAGTGGGTCTGGGA |
| | | | CAGACTTCACTCTCACCATCAGCAGCCTAGAGCCTGAAGAT |
| | | | TTTGCAGTTTATTACTGTCAGCAGCGTAGCAACTGGCCGCT |
| | | | CACTTTCGGCGGAGGGACCAAGGTGGAGATCAAA |
| VY006 | 2248 | HCDR1 | GFTFSSYT |
| | 2219 | HCDR2 | ISSSSSTI |
| | 2249 | HCDR3 | ASLGRGDC |
| | 2221 | FR H1 | [sequence omitted] |
| | 2236 | FR H2 | MNWVRQAPGKGLEWVSY |
| | 2250 | FR H3 | YYADSVKGRFTISRDNAKNSLYLQMNSLRDEDTAVYYC |
| | 2206 | FR H4 | WGQGTLVTVSS |
| | 2207 | LCDR1 | QSLVHSDGNTY |
| | 2208 | LCDR2 | KIS |
| | 2224 | LCDR3 | MQATQFPRT |
| | 2225 | FR L1 | DIVMTQTPLSSPVTLGQPASISCRSS |
| | 2211 | FR L2 | LSWLQQRPGQPPRLLIY |
| | 2251 | FR L3 | KRFSGVPDRFSGSGAGTDFTLKISRVEAEDVGVYYC |
| | 2252 | FR L4 | FGQGTRLEIK |
| | 2253 | VH | EVQLVESGGGLVQPGGSLRLSCAASGFTFSSYTMNWVRQAP |
| | | | GKGLEWVSYISSSSSTIYYADSVKGRFTISRDNAKNSLYLQ |
| | | | MNSLRDEDTAVYYCASLGRGDCWGQGTLVTVSS |
| | 2254 | VL | DIVMTQTPLSSPVTLGQPASISCRSSQSLVHSDGNTYLSWL |
| | | | QQRPGQPPRLLIYKISKRFSGVPDRFSGSGAGTDFTLKISR |
| | | | VEAEDVGVYYCMQATQFPRTFGQGTRLEIK |
| | 2255 | VH (DNA) | GAGGTGCAGCTGGTGGAGTCTGGGGGAGGCTTGGTACAGCC |
| | | | TGGGGGGTCCCTGAGACTCTCCTGTGCAGCCTCTGGATTCA |
| | | | CCTTCAGTAGTTATACCATGAACTGGGTCCGCCAGGCTCCA |
| | | | GGGAAGGGGCTGGAGTGGGTTTCATACATTAGTAGTAGTAG |
| | | | TAGTACCATATACTACGCAGACTCTGTGAAGGGCCGATTCA |
| | | | CCATCTCCAGAGACAATGCCAAGAACTCACTGTATCTGCAA |
| | | | ATGAACAGCCTGAGAGACGAGGACACGGCTGTGTATTACTG |
| | | | TGCGAGTCTGGGGAGAGGGGACTGCTGGGGCCAGGGAACCC |
| | | | TGGTCACCGTCTCCTCA |
| | 2256 | VL (DNA) | GATATTGTGATGACCCAGACTCCACTCTCCTCACCTGTCAC |
| | | | CCTTGGACAGCCGGCCTCCATCTCCTGCAGGTCTAGTCAAA |
| | | | GCCTCGTACACAGTGATGGAAACACCTACTTGAGTTGGCTT |
| | | | CAGCAGAGGCCAGGCCAGCCTCCAAGACTCCTAATTTATAA |
| | | | GATTTCTAAACGGTTCTCTGGGGTCCCAGACAGATTCAGTG |
| | | | GCAGTGGGGCAGGGACAGATTTCACACTGAAAATCAGCAGG |
| | | | GTGGAAGCTGAGGATGTCGGGGTTTATTACTGCATGCAAGC |
| | | | TACACAATTTCCTCGGACCTTCGGCCAAGGGACACGACTGG |
| | | | AGATTAAA |
| VY018 | 2200 | HCDR1 | GGSISNYY |
| | 2257 | HCDR2 | IYTSGDT |
| | 2258 | HCDR3 | ARAGIVGTPGLGMDV |
| | 2203 | FR H1 | QVQLQESGPGLVKPSETLSLTCTVS |
| | 2259 | FR H2 | WSWIRQPAGKGLEWIGR |
| | 2260 | FR H3 | YYNPSLQSRVTMSVDTSKNQFSLKLSAVTAADTAVYYC |
| | 2261 | FR H4 | WGQGTTVTVSS |
| | 2262 | LCDR1 | ALPKQY |
| | 2263 | LCDR2 | KDS |
| | 2264 | LCDR3 | QSADSSGTYRV |
| | 2265 | FR L1 | SYELTQPPSVSVSPGQTARITCSGE |
| | 2266 | FR L2 | AYWYQQKPGQAPVLVIY |
| | 2267 | FR L3 | ERPSGIPERFSGSSSGTTVILTISGVQAEDEADYYC |
| | 2268 | FR L4 | FGGGTKLTVL |
| | 2269 | VH | QVQLQESGPGLVKPSETLSLTCTVSGGSISNYYWSWIRQPA |
| | | | GKGLEWIGRIYTSGDTYYNPSLQSRVTMSVDISKNQFSLKL |
| | | | SAVTAADTAVYYCARAGIVGTPGLGMDVWGQGTTVTVSS |
| | 2270 | VL | SYELTQPPSVSVSPGQTARITCSGEALPKQYAYWYQQKPGQ |
| | | | APVLVIYKDSERPSGIPERFSGSSSGTTVILTISGVQAEDE |
| | | | ADYYCQSADSSGTYRVFGGGTKLTVL |
| | 2271 | VH (DNA) | CAGGTGCAGCTGCAGGAGTCGGGCCCAGGACTGGTGAAGCC |
| | | | TTCGGAGACCCTGTCCCTCACCTGCACTGTCTCTGGTGGCT |
| | | | CCATCAGTAATTACTACTGGAGTTGGATCCGGCAGCCCGCC |
| | | | GGGAAGGGTCTGGAGTGGATTGGGCGTATCTATACCAGTGG |
| | | | GGACACCTACTACAACCCCTCCCTCCAGAGTCGAGTCACCA |
| | | | TGTCAGTAGACACGTCCAAGAACCAGTTCTCCCTGAAGCTG |
| | | | AGCGCTGTGACCGCCGCGGACACGGCCGTCTATTACTGTGC |
| | | | GAGAGCGGGTATAGTGGGAACTCCGGGACTCGGTATGGACG |
| | | | TCTGGGGCCAAGGGACCACGGTCACCGTCTCCTCA |
| | 2272 | VL (DNA) | TCCTATGAGCTGACACAGCCACCCTCGGTGTCAGTGTCCCC |
| | | | AGGACAGACGGCCAGGATCACCTGCTCTGGAGAAGCATTGC |
| | | | CAAAGCAATATGCTTATTGGTACCAGCAGAAGCCAGGCCAG |
| | | | GCCCCTGTGCTGGTGATATATAAAGACAGTGAGAGGCCCTC |
| | | | AGGGATCCCTGAGCGATTCTCTGGCTCCAGCTCAGGGACAA |
| | | | CAGTCACGTTGACCATCAGTGGAGTCCAGGCAGAAGATGAG |
| | | | GCTGACTATTACTGTCAATCAGCAGACAGCAGTGGTACTTA |
| | | | TCGGGTGTTCGGCGGAGGGACCAAGCTGACCGTCCTA |
| VY003 | 2273 | HCDR1 | GFTFSSYR |
| | 2274 | HCDR2 | ISSSRSAI |
| | 2275 | HCDR3 | ATLGIGY |
| | 2276 | FR H1 | EVQMVESGGGLVQPGGSLTLSCAAS |
| | 2236 | FR H2 | MNWVRQAPGKGLEWVSY |
| | 2250 | FR H3 | YYADSVKGRFTISRDNAKNSLYLQMNSLRDEDTAVYYC |
| | 2206 | FR H4 | WGQGTLVTVSS |
| | 2207 | LCDR1 | QSLVHSDGNTY |
| | 2208 | LCDR2 | KIS |
| | 2277 | LCDR3 | MQVTQFPRT |
| | 2225 | FR L1 | DIVMTQTPLSSPVTLGQPASISCRSS |
| | 2211 | FR L2 | LSWLQQRPGQPPRLLIY |
| | 2278 | FR L3 | NRFSGVPDRFSGSGAGTDFTLKITRVEAEDVGIYYC |
| | 2279 | FR L4 | FGQGTKVEIR |
| | 2280 | VH | EVQMVESGGGLVQPGGSLTLSCAASGFTFSSYRMNWVRQAP |
| | | | GKGLEWVSYISSSRSAIYYADSVKGRFTISRDNAKNSLYLQ |
| | | | MNSLRDEDTAVYYCAILGIGYWGQGTLVTVSS |
| | 2281 | VL | DIVMTQTPLSSPVTLGQPASISCRSSQSLVHSDGNTYLSWL |
| | | | QQRPGQPPRLLIYKISNRFSGVPDRFSGSGAGTDFTLKITR |
| | | | VEAEDVGIYYCMQVTQFPRTFGQGTKVEIR |
| | 2282 | VH (DNA) | GAGGIGCAGATGGTGGAGTCTGGGGGAGGCTTGGTACAGCC |
| | | | TGGGGGGTCCCTGACACTCTCCTGTGCAGCCTCTGGATTCA |
| | | | CCTTCAGTAGCTATAGAATGAACTGGGTCCGCCAGGCTCCA |
| | | | GGGAAGGGGCTGGAGTGGGTTTCATACATTAGCAGTAGTAG |
| | | | AAGTGCCATATACTACGCAGACTCTGTGAAGGGCCGATTCA |
| | | | CCATCTCCAGAGACAATGCCAAGAACTCACTGTATCTGCAA |
| | | | ATGAACAGCCTGAGAGACGAGGACACGGCTGTGTATTACTG |
| | | | TGCGACCCTGGGGATAGGCTACTGGGGCCAGGGAACCCTGG |
| | | | TCACCGTCTCCTCA |
| | 2283 | VL (DNA) | GATATTGTGATGACCCAGACTCCACTCTCCTCACCTGTCAC |
| | | | CCTTGGACAGCCGGCCTCCATCTCCTGCAGGTCTAGTCAAA |
| | | | GCCTCGTACACAGTGATGGAAACACCTACTTGAGTTGGCTT |
| | | | CAGCAGAGGCCAGGCCAGCCTCCAAGACTCCTAATTTATAA |
| | | | GATTTCTAACCGGTTCTCTGGGGTCCCAGACAGATTCAGTG |
| | | | GCAGTGGGGCAGGGACAGATTTCACACTGAAAATCACCAGG |
| | | | GTGGAGGCTGAGGATGTCGGGATTTATTACTGCATGCAAGT |
| | | | TACACAATTTCCTCGGACGTTCGGCCAAGGGACCAAGGGG |
| | | | AAATCAGA |
| VY016 | 2284 | HCDR1 | GFTFSSYS |
| | 2285 | HCDR2 | ISRSGSTI |
| | 2286 | HCDR3 | ARGNWAY |
| | 2221 | FR H1 | [sequence omitted] |
| | 2236 | FR H2 | MNWVRQAPGKGLEWVSY |
| | 2287 | FR H3 | YYADSVEGRFTISRDNAYNSLYLQMISLRDDDTAVYYC |
| | 2288 | FR H4 | WGQGILVTVSS |
| | 2289 | LCDR1 | SSNIGAGYD |
| | 2290 | LCDR2 | GNS |
| | 2291 | LCDR3 | QSYDSSLSGSV |
| | 2292 | FR L1 | QSVLTQPPSVSGAPGQRVTISCTGS |
| | 2293 | FR L2 | VHWYQQLPGTAPKLLIY |
| | 2294 | FR L3 | NRPSGVPDRFSGSKSGTSASLAITGLQAEDETDFYC |
| | 2268 | FR L4 | FGGGTKLTVL |
| | 2295 | VH | EVQLVESGGGLVQPGGSLRLSCAASGFTFSSYSMNWVRQAP |
| | | | GKGLEWVSYISRSGSTIYYADSVEGRFTISRDNAYNSLYLQ |
| | | | MISLRDDDTAVYYCARGNWAYWGQGILVTVSS |
| | 2296 | VL | QSVLTQPPSVSGAPGQRVTISCTGSSSNIGAGYDVHWYQQL |
| | | | PGTAPKLLIYGNSNRPSGVPDRFSGSKSGTSASLAITGLQA |
| | | | EDETDFYCQSYDSSLSGSVFGGGTKLIVL |
| | 2297 | VH (DNA) | GAGGTGCAGCTGGTGGAGTCTGGGGGAGGCTTGGTACAGCC |
| | | | TGGGGGGTCCCTGAGACTCTCCTGTGCAGCCTCTGGATTCA |
| | | | CCTTCAGTAGCTATAGCATGAACTGGGTCCGCCAGGCTCCA |
| | | | GGGAAGGGGCTGGAGTGGGTTTCATACATTAGTCGTAGTGG |
| | | | TAGTACCATATACTACGCAGACTCTGTGGAGGGCCGATTCA |
| | | | CCATCTCCAGAGACAATGCCTACAACTCACTGTATCTGCAA |
| | | | ATGATCAGCCTGAGAGACGATGACACGGCTGTGTATTACTG |
| | | | TGCGAGAGGGAACTGGGCCTACTGGGGCCAGGGAATCCTGG |
| | | | TCACCGTCTCCTCA |
| | 2298 | VL (DNA) | CAGTCTGTGCTGACGCAGCCGCCCTCAGTGTCTGGGGCCCC |
| | | | AGGGCAGAGGGTCACCATCTCCTGCACTGGGAGCAGCTCCA |
| | | | ACATCGGGGCAGGTTATGATGTACACTGGTACCAGCAGCTT |
| | | | CCAGGAACAGCCCCCAAACTCCTCATCTATGGTAACAGCAA |
| | | | TCGGCCCTCAGGGGTCCCTGACCGATTCTCTGGCTCCAAGT |
| | | | CTGGCACCTCAGCCTCCCTGGCCATCACTGGGCTCCAGGCT |
| | | | GAGGATGAGACTGATTTTTACTGCCAGTCCTATGACAGCAG |
| | | | CCTGAGTGGTTCGGTTTTCGGCGGAGGGACCAAGCTGACCG |
| | | | TCCTG |
| VY017 | 2284 | HCDR1 | GFTFSSYS |
| | 2299 | HCDR2 | IRSSSSTI |
| | 2300 | HCDR3 | ARRSIADY |
| | 2221 | FR H1 | [sequence omitted] |
| | 2236 | FR H2 | MNWVRQAPGKGLEWVSY |
| | 2301 | FR H3 | YYADSVKGRFTISRDNAKKSLYLQMNSLRDEDTAVYYC |
| | 2206 | FR H4 | WGQGTLVTVSS |
| | 2302 | LCDR1 | QSVTSY |
| | 2303 | LCDR2 | DAS |
| | 2304 | LCDR3 | QQRSNWPYT |
| | 2305 | FR L1 | EIVLTQSPATLSSSPGERATLSCRAS |
| | 2306 | FR L2 | LNWYQQKPGQAPRLLIY |
| | 2307 | FR L3 | NRATGIPARFSGSGSGTDFTLTISSLEPEDFALYYC |
| | 2308 | FR L4 | FGQGTKLEIK |
| | 2309 | VH | EVQLVESGGGLVQPGGSLRLSCAASGFTFSSYSMNWVRQAP |
| | | | GKGLEWVSYIRSSSSTIYYADSVKGRFTISRDNAKKSLYLQ |
| | | | MNSLRDEDTAVYYCARRSIADYWGQGTLVTVSS |
| | 2310 | VL | EIVLTQSPATLSSSPGERATLSCRASQSVTSYLNWYQQKPG |
| | | | QAPRLLIYDASNRATGIPARFSGSGSGTDFTLTISSLEPED |
| | | | FALYYCQQRSNWPYTFGQGTKLEIK |
| | 2311 | VH (DNA) | GAGGTGCAGTTGGTGGAGTCTGGGGGAGGCTTGGTACAGCC |
| | | | TGGGGGGTCCCTGAGACTCTCCTGTGCAGCCTCTGGATTCA |
| | | | CCTTCAGTAGCTATAGCATGAACTGGGTCCGCCAGGCTCCA |
| | | | GGGAAGGGGCTGGAGTGGGTTTCATACATTAGGAGTAGTAG |
| | | | TAGTACCATATACTACGCAGACTCTGTGAAGGGCCGATTCA |
| | | | CCATCTCCAGAGACAATGCCAAGAAATCATTGTATCTGCAA |
| | | | ATGAATAGTCTGAGAGACGAGGACACGGCTGTGTATTACTG |
| | | | TGCGAGAAGGAGTATAGCTGACTACTGGGGCCAGGGAACCC |
| | | | TGGTCACCGTCTCCTCA |
| | 2312 | VL (DNA) | GAAATTGTGTTGACACAGTCTCCAGCCACCCTGTCTTCGTC |
| | | | TCCAGGGGAAAGAGCCACCCTCTCCTGCAGGGCCAGTCAGA |
| | | | GTGTTACCAGCTACTTAAACTGGTACCAACAGAAACCTGGC |
| | | | CAGGCTCCCAGGCTCCTCATCTATGATGCATCCAACAGGGC |
| | | | CACTGGCATCCCAGCCAGGTTCAGTGGCAGTGGGTCTGGGA |
| | | | CAGACTTCACTCTCACCATCAGCAGCCTCGAGCCTGAAGAT |
| | | | TTTGCACTTTATTACTGTCAGCAGCGTAGCAACTGGCCGTA |
| | | | CACTTTTGGCCAGGGGACCAAACTGGAGATCAAA |
| VY012 | 2313 | HCDR1 | GFTYSSYA |
| | 2314 | HCDR2 | ISGSSSIT |
| | 2315 | HCDR3 | AKGGRYGYFQH |
| | 2316 | FR H1 | EVQLLESGGGLVQPGGSLRLSCAAS |
| | 2317 | FR H2 | MSWVRRAPGKGLEWISI |
| | 2318 | FR H3 | YYADSMKGRFTISRDNSKNTLFLQMNSLRAEDTAVYYC |
| | 2206 | FR H4 | WGQGTLVTVSS |
| | 2319 | LCDR1 | NIGSKS |
| | 2320 | LCDR2 | DDS |
| | 2321 | LCDR3 | QVWDSSSDPVV |
| | 2322 | FR L1 | SYVLTQPPSVSVAPGQTARITCGGN |
| | 2323 | FR L2 | VHWYQQKPGQAPVLVVY |
| | 2324 | FR L3 | DRPSGIPERFSGSNSGNTATLTISRVEAGDEADYYC |
| | 2325 | FR L4 | FGGGTMLTVL |
| | 2326 | VH | EVQLLESGGGLVQPGGSLRLSCAASGFTYSSYAMSWVRRAP |
| | | | GKGLEWISIISGSSSITYYADSMKGRFTISRDNSKNTLFLQ |
| | | | MNSLRAEDTAVYYCAKGGRYGYFQHWGQGTLVTVSS |
| | 2327 | VI | SYVLTQPPSVSVAPGQTARITCGGNNIGSKSVHWYQQKPGQ |
| | | | APVLVVYDDSDRPSGIPERFSGSNSGNTATLTISRVEAGDE |
| | | | ADYYCQVWDSSSDPVVFGGGTMLTVL |
| | 2328 | VH (DNA) | GAGGTGCAGCTGTTGGAGTCTGGGGGAGGCTTGGTACAGCC |
| | | | GGGGGGGTCCCTGAGACTCTCCTGTGCAGCCTCGGGATTCA |
| | | | CCTATAGCAGCTATGCCATGAGCTGGGTCCGCCGGGCTCCA |
| | | | GGGAAGGGGCTGGAGTGGATCTCAATTATTAGTGGTAGTAG |
| | | | TAGTATCACATACTACGCAGACTCCATGAAGGGCCGGTTCA |
| | | | CTATCTCTAGAGACAATTCCAAGAACACGCTTTTTCTGCAA |
| | | | ATGAATAGCCTGAGAGCCGAGGACACGGCCGTTTATTACTG |
| | | | TGCGAAGGGGGGGAGGTACGGGTACTTCCAACACTGGGGCC |
| | | | AGGGCACCCTGGTCACCGTCTCCTCA |
| | 2329 | VL (DNA) | TCCTATGTGCTGACTCAGCCACCCTCGGTGTCAGTGGCCCC |
| | | | AGGACAGACGGCCAGGATTACCTGTGGGGGAAACAACATTG |
| | | | GAAGTAAAAGTGTGCACTGGTACCAGCAGAAGCCAGGCCAG |
| | | | GCCCCTGTGCTGGTCGTCTATGATGATAGCGACCGGCCCTC |
| | | | AGGGATCCCTGAGCGATTCTCTGGCTCCAACTCTGGGAACA |
| | | | CGGCCACCCTGACCATCAGCAGGGTCGAAGCCGGGGATGAG |
| | | | GCCGACTATTACTGTCAGGTGTGGGATAGTAGTAGTGATCC |
| | | | TGTGGTATTCGGCGGAGGGACCATGCTGACCGTCCTA |
| VY009 | 2330 | HCDR1 | GFSLSTSEVG |
| | 2331 | HCDR2 | IYWNDHK |
| | 2332 | HCDR3 | ARRVTGEGFDP |
| | 2333 | FR H1 | QITLKESGPTLVKPTQTLTLTCTLS |
| | 2334 | FR H2 | VGWIRQPPGKALEWLAI |
| | 2335 | FR H3 | RYSPSLKNRLIFTKDTSKNQVVLTMINMDPVDTATYYC |
| | 2206 | FR H4 | WGQGTLVTVSS |
| | 2262 | LCDR1 | ALPKQY |
| | 2336 | LCDR2 | KDT |
| | 2337 | LCDR3 | QSADSSGSYV |
| | 2338 | FR L1 | SYELTQPPSVSVSPGQTARITCSGD |
| | 2339 | FR L2 | AYWYQQKPGQAPVLVIF |
| | 2267 | FR L3 | ERPSGIPERFSGSSSGTTVILTISGVQAEDEADYYC |
| | 2340 | FR L4 | FGTGTKVTVL |
| | 2341 | VH | QITLKESGPTLVKPTQTLTLTCTLSGFSLSTSEVGVGWIRQ |
| | | | PPGKALEWLAIIYWNDHKRYSPSLKNRLTFTKDTSKNQVVL |
| | | | TMTNMDPVDTATYYCARRVTGEGFDPWGQGTLVTVSS |
| | 2342 | VL | SYELTQPPSVSVSPGQTARITCSGDALPKQYAYWYQQKPGQ |
| | | | APVLVIFKDTERPSGIPERFSGSSSGITVILTISGVQAEDE |
| | | | ADYYCQSADSSGSYVFGTGTKVTVL |
| | 2343 | VH (DNA) | CAGATCACCTTAAAGGAGTCTGGTCCTACGCTGGTGAAACC |
| | | | CACACAGACCCTCACGCTGACCTGCACCCTCTCTGGGTTCT |
| | | | CACTCAGCACTAGTGAAGTGGGTGTGGGCTGGATCCGTCAG |
| | | | CCCCCAGGAAAGGCCCTGGAGTGGCTTGCAATCATTTATTG |
| | | | GAATGATCATAAGCGCTACAGCCCATCTCTGAAGAACAGGC |
| | | | TCACCTTCACCAAGGACACCTCCAAAAACCAGGTGGTCCTT |
| | | | ACAATGACCAACATGGACCCTGTGGACACAGCCACATATTA |
| | | | TTGTGCACGCAGAGTAACTGGGGAGGGGTTCGACCCCTGGG |
| | | | GCCAGGGAACCCTGGTCACCGTCTCCTCA |
| | 2344 | VL (DNA) | TCCTATGAGCTGACACAGCCACCCTCGGTGTCAGTGTCCCC |
| | | | AGGACAGACGGCCAGGATCACCTGCTCTGGAGATGCATTGC |
| | | | CAAAGCAATATGCTTATTGGTACCAGCAGAAGCCAGGCCAG |
| | | | GCCCCTGTGCTGGTGATATTTAAAGACACTGAGAGGCCCTC |
| | | | AGGGATCCCTGAGCGATTCTCTGGCTCCAGCTCAGGGACAA |
| | | | CAGTCACGTTGACCATCAGTGGAGTCCAGGCAGAAGATGAG |
| | | | GCTGACTATTACTGTCAATCAGCAGACAGCAGTGGTTCTTA |
| | | | TGTCTTCGGAACTGGGACCAAGGTCACCGTCCTA |
| VY010 | 2345 | HCDR1 | GFTFSTYS |
| | 2346 | HCDR2 | ISSGSSYI |
| | 2347 | HCDR3 | TVTTHFHH |
| | 2348 | FR H1 | EVQLVESGGGLVKPGGSLRLSCAAS |
| | 2349 | FR H2 | MNWVRQAPGKGLEWVSS |
| | 2350 | FR H3 | YYADSVKGRFTISRDNAKNSLYLQMNSLRAEDTAVYYC |
| | 2206 | FR H4 | WGQGTLVTVSS |
| | 2351 | LCDR1 | QSLVYSDGNTY |
| | 2352 | LCDR2 | KVS |
| | 2353 | LCDR3 | MQGTHWPLT |
| | 2354 | FR L1 | DVVMTQSPLSLPVTLGQPASISCRSS |
| | 2355 | FR L2 | LNWFQQRPGQSPRRLIY |
| | 2356 | FR L3 | NRDSGVPDRFSGSGSGTDFTLKISRVEAEDVGVYYC |
| | 2252 | FR L4 | FGQGTRLEIK |
| | 2357 | VH | EVQLVESGGGLVKPGGSLRLSCAASGFTFSTYSMNWVRQAP |
| | | | GKGLEWVSSISSGSSYIYYADSVKGRFTISRDNAKNSLYLQ |
| | | | MNSLRAEDTAVYYCTVTTHFHHWGQGTLVTVSS |
| | 2358 | VL | DVVMTQSPLSLPVTLGQPASISCRSSQSLVYSDGNTYLNWF |
| | | | QQRPGQSPRRLIYKVSNRDSGVPDRFSGSGSGTDFTLKISR |
| | | | VEAEDVGVYYCMQGTHWPLTFGQGTRLEIK |
| | 2359 | VH (DNA) | GAGGTGCAGCTGGTGGAGTCTGGGGGAGGCCTGGTCAAGCC |
| | | | TGGGGGGTCCCTGAGACTCTCCTGTGCAGCCTCTGGATTCA |
| | | | CCTTCAGTACCTATAGCATGAACTGGGTCCGCCAGGCTCCA |
| | | | GGGAAGGGGCTGGAGTGGGTCTCATCCATTAGTAGTGGTAG |
| | | | TAGTTACATATACTACGCAGACTCAGTGAAGGGCCGATTCA |
| | | | CCATCTCCAGAGACAACGCCAAGAACTCACTGTATCTGCAA |
| | | | ATGAACAGCCTGAGAGCCGAGGACACGGCTGTGTATTACTG |
| | | | TACAGTAACTACACACTTCCACCACTGGGGCCAGGGCACCC |
| | | | TGGTCACCGTCTCCTCA |
| | 2360 | VL (DNA) | GATGTTGTGATGACTCAGTCTCCACTCTCCCTGCCCGTCAC |
| | | | CCTTGGACAGCCGGCCTCCATCTCCTGCAGGTCTAGTCAAA |
| | | | GCCTCGTATACAGTGATGGAAACACCTACTTGAATTGGTTT |
| | | | CAGCAGAGGCCAGGCCAATCTCCAAGGCGCCTAATTTATAA |
| | | | GGTTTCTAACCGGGACTCTGGGGTCCCAGACAGATTCAGCG |
| | | | GCAGTGGGTCAGGCACTGATTTCACACTAAAAATCAGCAGG |
| | | | GTGGAGGCTGAGGATGTTGGGGTTTATTACTGCATGCAAGG |
| | | | TACACACTGGCCTCTCACCTTCGGCCAAGGGACACGACTGG |
| | | | AGATTAAA |
| VY022 | 2345 | HCDR1 | GFTFSTYS |
| | 2346 | HCDR2 | ISSGSSYI |
| | 2347 | HCDR3 | TVTTHFHH |
| | 2348 | FR H1 | EVQLVESGGGLVKPGGSLRLSCAAS |
| | 2349 | FR H2 | MNWVRQAPGKGLEWVSS |
| | 2350 | FR H3 | YYADSVKGRFTISRDNAKNSLYLQMNSLRAEDTAVYYC |
| | 2206 | FR H4 | WGQGTLVTVSS |
| | 2361 | LCDR1 | SGINVGAYR |
| | 2362 | LCDR2 | YKSDSDK |
| | 2363 | LCDR3 | MIWHSSAWV |
| | 2364 | FR L1 | QAVLTQPSSLSASPGASARLTCTLR |
| | 2365 | FR L2 | LYWYQQKPGSPPQYLLR |
| | 2366 | FR L3 | QQGSGVPSRFSGSKDASANAGILLISGLQSEDEADYYC |
| | 2268 | FR L4 | FGGGTKLTVL |
| | 2367 | VH | EVQLVESGGGLVKPGGSLRLSCAASGFTFSTYSMNWVRQAP |
| | | | GKGLEWVSSISSGSSYIYYADSVKGRFTISRDNAKNSLYLQ |
| | | | MNSLRAEDTAVYYCTVTTHFHHWGQGTLVTVSS |
| | 2368 | VL | QAVLTQPSSLSASPGASARLICTLRSGINVGAYRLYWYQQK |
| | | | PGSPPQYLLRYKSDSDKQQGSGVPSRFSGSKDASANAGILL |
| | | | ISGLQSEDEADYYCMIWHSSAWVFGGGTKLTVL |
| | 2369 | VH (DNA) | GAGGTGCAGCTGGTGGAGTCTGGGGGAGGCCTGGTCAAGCC |
| | | | TGGGGGGTCCCTGAGACTCTCCTGTGCAGCCTCTGGATTCA |
| | | | CCTTCAGTACCTATAGCATGAACTGGGTCCGCCAGGCTCCA |
| | | | GGGAAGGGGCTGGAGTGGGTCTCATCCATTAGTAGTGGTAG |
| | | | TAGTTACATATACTACGCAGACTCAGTGAAGGGCCGATTCA |
| | | | CCATCTCCAGAGACAACGCCAAGAACTCACTGTATCTGCAA |
| | | | ATGAACAGCCTGAGAGCCGAGGACACGGCTGTGTATTACTG |
| | | | TACAGTAACTACACACTTCCACCACTGGGGCCAGGGCACCC |
| | | | TGGTCACCGTCTCCTCA |
| | 2370 | VL (DNA) | CAGGCTGTGCTGACTCAGCCGTCTTCCCTCTCTGCATCTCC |
| | | | TGGAGCATCAGCCAGACTCACCTGCACCTTGCGCAGTGGCA |
| | | | TCAATGTTGGTGCCTACAGGCTATACTGGTACCAGCAGAAG |
| | | | CCAGGAAGTCCTCCCCAGTATCTCCTGAGGTACAAATCAGA |
| | | | CTCAGATAAGCAGCAGGGCTCTGGAGTCCCCAGCCGCTTCT |
| | | | CTGGATCCAAAGATGCTTCGGCCAATGCAGGGATTTTACTC |
| | | | ATCTCTGGGCTCCAGTCTGAGGATGAGGCTGACTATTACTG |
| | | | TATGATTTGGCACAGCAGCGCTTGGGTGTTCGGCGGAGGGA |
| | | | CCAAGCTGACCGTCCTA |
| VY001 | 2371 | HCDR1 | GFTFSSYN |
| | 2372 | HCDR2 | ISSSSNTI |
| | 2373 | HCDR3 | ATLGRGY |
| | 2221 | FR H1 | [sequence omitted] |
| | 2222 | FR H2 | MNWVRQAPGKGLEWISY |
| | 2374 | FR H3 | YYADSVKGRFTVSRDNAKNSLYLQMNSLRDEDTAVYYC |
| | 2375 | FR H4 | WGQGTLVIASS |
| | 2207 | LCDR1 | QSLVHSDGNTY |
| | 2208 | LCDR2 | KIS |
| | 2224 | LCDR3 | MQATQFPRT |
| | 2376 | FR L1 | DVVMTQTPLSSPVTLGQPASISCRSS |
| | 2211 | FR L2 | LSWLQQRPGQPPRLLIY |
| | 2226 | FR L3 | NRFSGVPDRFSGSGAGTDFTLKISRVEAEDVGVYYC |
| | 2308 | FR L4 | FGQGTKLEIK |
| | 2377 | VH | EVQLVESGGGLVQPGGSLRLSCAASGFTFSSYNMNWVRQAP |
| | | | GKGLEWISYISSSSNTIYYADSVKGRFTVSRDNAKNSLYLQ |
| | | | MNSLRDEDTAVYYCATLGRGYWGQGTLVIASS |
| | 2378 | VL | DVVMTQTPLSSPVTLGQPASISCRSSQSLVHSDGNTYLSWL |
| | | | QQRPGQPPRLLIYKISNRFSGVPDRFSGSGAGTDFTLKISR |
| | | | VEAEDVGVYYCMQATQFPRTFGQGTKLEIK |
| | 2379 | VH (DNA) | GAGGTGCAACTGGTGGAGTCTGGGGGAGGCTTGGTACAGCC |
| | | | TGGGGGGTCCCTGAGACTCTCCTGTGCAGCCTCTGGATTCA |
| | | | CCTTCAGTAGCTATAACATGAACTGGGTTCGCCAGGCTCCA |
| | | | GGGAAGGGGCTGGAGTGGATTTCATACATTAGTAGTAGTAG |
| | | | TAATACCATATACTACGCAGACTCTGTGAAGGGCCGATTCA |
| | | | CCGTCTCCAGGGACAATGCCAAGAACTCACTGTATCTGCAA |
| | | | ATGAACAGCCTGAGAGACGAGGACACGGCTGTGTATTACTG |
| | | | TGCGACTCTGGGGAGGGGCTACTGGGGCCAGGGAACCCTGG |
| | | | TCATCGCCTCCTCA |
| | 2380 | VL (DNA) | GATGTTGTGATGACCCAGACTCCACTCTCCTCACCTGTCAC |
| | | | CCTTGGACAGCCGGCCTCCATCTCCTGCAGGTCTAGTCAAA |
| | | | GCCTCGTACACAGTGATGGAAACACCTACTTGAGTTGGCTT |
| | | | CAGCAGAGGCCAGGCCAGCCTCCAAGACTCCTAATTTATAA |
| | | | GATTTCTAACCGGTTCTCTGGGGTCCCAGACAGATTCAGTG |
| | | | GCAGTGGGGCAGGGACAGATTTCACACTGAAAATCAGCAGG |
| | | | GTGGAAGCTGAGGATGTCGGGGTTTATTACTGCATGCAAGC |
| | | | TACACAATTTCCTCGCACTTTTGGCCAGGGGACCAAGCTGG |
| | | | AGATCAAA |
| VY019 | 2381 | HCDR1 | GGSISSYY |
| | 2382 | HCDR2 | IDTSGST |
| | 2383 | HCDR3 | ARGGDGYRY |
| | 2203 | FR H1 | QVQLQESGPGLVKPSETLSLTCTVS |
| | 2204 | FR H2 | WTWIRQPAGKGLEWIGR |
| | 2384 | FR H3 | NYNPSLKSRVTMSIDTSKKQFSLKLSSVTAADTAVYYC |
| | 2206 | FR H4 | WGQGTLVTVSS |
| | 2262 | LCDR1 | ALPKQY |
| | 2263 | LCDR2 | KDS |
| | 2385 | LCDR3 | QSTDSSGSWV |
| | 2338 | FR L1 | SYELTQPPSVSVSPGQTARITCSGD |
| | 2386 | FR L2 | ACWYQQKPGQAPVLVIY |
| | 2387 | FR L3 | ERPSGIPERFSGSSSGTTVTLTITGVQAEDEADYYC |
| | 2268 | FR L4 | FGGGTKLTVL |
| | 2388 | VH | QVQLQESGPGLVKPSETLSLTCTVSGGSISSYYWTWIRQPA |
| | | | GKGLEWIGRIDTSGSTNYNPSLKSRVTMSIDTSKKQFSLKL |
| | | | SSVTAADTAVYYCARGGDGYRYWGQGTLVTVSS |
| | 2389 | VL | SYELTQPPSVSVSPGQTARITCSGDALPKQYACWYQQKPGQ |
| | | | APVLVIYKDSERPSGIPERFSGSSSGTTVILTITGVQAEDE |
| | | | ADYYCQSTDSSGSWVFGGGTKLTVL |
| | 2390 | VH (DNA) | CAGGTGCAGCTGCAGGAGTCGGGCCCAGGACTGGTGAAGCC |
| | | | TTCGGAGACCCTGTCCCTCACCTGCACTGTCTCTGGTGGCT |
| | | | CCATCAGTAGTTACTACTGGACCTGGATCCGGCAGCCCGCC |
| | | | GGGAAGGGACTGGAGTGGATTGGGCGTATCGATACCAGTGG |
| | | | GAGCACCAACTACAACCCCTCCCTCAAGAGTCGAGTCACCA |
| | | | TGTCAATAGACACGTCCAAGAAACAGTTCTCCCTGAAGCTG |
| | | | AGCTCTGTGACCGCCGCGGACACGGCCGTGTATTACTGTGC |
| | | | GAGAGGGGGAGATGGCTACCGCTACTGGGGCCAGGGAACCC |
| | | | TGGTCACCGTCTCCTCA |
| | 2391 | VL (DNA) | TCCTATGAGCTGACACAGCCACCCTCGGTGTCAGTGTCCCC |
| | | | AGGACAGACGGCCAGGATCACCTGCTCTGGAGATGCATTGC |
| | | | CAAAGCAATATGCTTGTTGGTACCAGCAGAAGCCAGGCCAG |
| | | | GCCCCTGTGCTGGTGATATATAAAGACAGTGAGAGGCCCTC |
| | | | AGGGATCCCTGAGCGATTCTCTGGCTCCAGCTCAGGGACAA |
| | | | CAGTCACGTTGACCATCACTGGAGTCCAGGCAGAAGATGAG |
| | | | GCTGACTATTACTGTCAATCCACAGACAGCAGTGGTTCTTG |
| | | | GGTGTTCGGCGGAGGGACCAAGCTGACCGTCCTA |
| VY020 | 2284 | HCDR1 | GFTFSSYS |
| | 2392 | HCDR2 | ISSSNSTI |
| | 2393 | HCDR3 | ARRSLGDY |
| | 2221 | FR H1 | [sequence omitted] |
| | 2222 | FR H2 | MNWVRQAPGKGLEWISY |
| | 2394 | FR H3 | KYADSVKGRFTISRDNAKNSLYLQMNSLRDEDTAVYYC |
| | 2395 | FR H4 | WGQGTLVIVSS |
| | 2396 | LCDR1 | QSVSSY |
| | 2239 | LCDR2 | DVS |
| | 2397 | LCDR3 | QQRRNWPYT |
| | 2241 | FR L1 | EIVLIQSPATLSLSPGERATLSCRAS |
| | 2398 | FR L2 | LAWYLQKPGQAPRLLIY |
| | 2399 | FR L3 | NRATGIPARFSGSGSGTDFTLTISRLEPEDFAVYYC |
| | 2308 | FR L4 | FGQGTKLEIK |
| | 2400 | VH | EVQLVESGGGLVQPGGSLRLSCAASGFTFSSYSMNWVRQAP |
| | | | GKGLEWISYISSSNSTIKYADSVKGRFTISRDNAKNSLYLQ |
| | | | MNSLRDEDTAVYYCARRSLGDYWGQGTLVIVSS |
| | 2401 | VL | EIVLTQSPATLSLSPGERATLSCRASQSVSSYLAWYLQKPG |
| | | | QAPRLLIYDVSNRATGIPARFSGSGSGTDFTLIISRLEPED |
| | | | FAVYYCQQRRNWPYTFGQGTKLEIK |
| | 2402 | VH (DNA) | GAGGTGCAGCTGGTGGAGTCTGGGGGAGGCTTGGTACAGCC |
| | | | TGGGGGGTCCCTGAGACTCTCCTGTGCAGCCTCTGGATTCA |
| | | | CCTTCAGTAGCTATAGCATGAACTGGGTCCGCCAGGCTCCA |
| | | | GGGAAGGGGCTGGAGTGGATTTCATACATTAGTAGTAGTAA |
| | | | TAGTACCATAAAGTACGCAGACTCTGTGAAGGGCCGATTCA |
| | | | CCATCTCCAGAGACAATGCCAAGAACTCACTGTATCTGCAA |
| | | | ATGAACAGCCTGAGAGACGAGGACACGGCTGTGTATTACTG |
| | | | TGCGAGAAGGAGTCTAGGTGACTACTGGGGCCAGGGAACCC |
| | | | TGGTCATCGTCTCCTCA |
| | 2403 | VL (DNA) | GAAATTGTGTTGACACAGTCTCCAGCCACCCTGTCTTTGTC |
| | | | TCCAGGGGAAAGAGCCACCCTCTCCTGCAGGGCCAGTCAGA |
| | | | GTGTTAGCAGCTACTTAGCCTGGTACCTACAGAAACCTGGC |
| | | | CAGGCTCCCAGGCTCCTCATCTATGATGTGTCCAACAGGGC |
| | | | CACTGGCATCCCAGCCAGGTTCAGTGGCAGTGGGTCTGGGA |
| | | | CAGACTTCACTCTCACCATCAGCAGACTAGAGCCTGAAGAT |
| | | | TTTGCAGTTTATTACTGTCAGCAGCGTCGCAACTGGCCGTA |
| | | | CACTTTTGGCCAGGGGACCAAGCTGGAGATCAAA |
| VY005 | 2284 | HCDR1 | GFTFSSYS |
| | 2392 | HCDR2 | ISSSNSTI |
| | 2393 | HCDR3 | ARRSLGDY |
| | 2221 | FR H1 | [sequence omitted] |
| | 2222 | FR H2 | MNWVRQAPGKGLEWISY |
| | 2394 | FR H3 | KYADSVKGRFTISRDNAKNSLYLQMNSLRDEDTAVYYC |
| | 2395 | FR H4 | WGQGTLVIVSS |
| | 2404 | LCDR1 | QGISCS |
| | 2405 | LCDR2 | AAS |
| | 2406 | LCDR3 | QQFNSYPFT |
| | 2407 | FR L1 | DIQLTQSPSFLSASVGDRVTITCRAS |
| | 2408 | FR L2 | LAWYQQKPGKAPKLLIY |
| | 2409 | FR L3 | TLQSGVPSRFSGSGSGTEFTLTISSLQPEDFATYYC |
| | 2410 | FR L4 | FGPGTKVDIK |
| | 2411 | VH | EVQLVESGGGLVQPGGSLRLSCAASGFTFSSYSMNWVRQAP |
| | | | GKGLEWISYISSSNSTIKYADSVKGRFTISRDNAKNSLYLQ |
| | | | MNSLRDEDTAVYYCARRSLGDYWGQGTLVIVSS |
| | 2412 | VL | DIQLTQSPSFLSASVGDRVTITCRASQGISCSLAWYQQKPG |
| | | | KAPKLLIYAASTLQSGVPSRFSGSGSGTEFTLTISSLQPED |
| | | | FATYYCQQFNSYPFTFGPGTKVDIK |
| | 2413 | VH (DNA) | GAGGTGCAGCTGGTGGAGTCTGGGGGAGGCTTGGTACAGCC |
| | | | TGGGGGGTCCCTGAGACTCTCCTGTGCAGCCTCTGGATTCA |
| | | | CCTTCAGTAGCTATAGCATGAACTGGGTCCGCCAGGCTCCA |
| | | | GGGAAGGGGCTGGAGTGGATTTCATACATTAGTAGTAGTAA |
| | | | TAGTACCATAAAGTACGCAGACTCTGTGAAGGGCCGATTCA |
| | | | CCATCTCCAGAGACAATGCCAAGAACTCACTGTATCTGCAA |
| | | | ATGAACAGCCTGAGAGACGAGGACACGGCTGTGTATTACTG |
| | | | TGCGAGAAGGAGTCTAGGTGACTACTGGGGCCAGGGAACCC |
| | | | TGGTCATCGTCTCCTCA |
| | 2414 | VL (DNA) | GACATCCAGTTGACCCAGTCTCCATCCTTCCTGTCTGCATC |
| | | | TGTAGGAGACAGAGTCACCATCACTTGCCGGGCCAGTCAGG |
| | | | GCATTAGCTGTTCTTTAGCCTGGTATCAGCAAAAACCAGGG |
| | | | AAAGCCCCTAAGCTCCTGATCTATGCTGCATCCACTTTGCA |
| | | | AAGTGGGGTCCCATCAAGGTTCAGCGGCAGTGGATCTGGGA |
| | | | CAGAATTCACTCTCACAATCAGCAGCCTGCAGCCTGAAGAT |
| | | | TTTGCAACTTATTACTGTCAACAGTTTAATAGTTACCCATT |
| | | | CACTTTCGGCCCTGGGACCAAAGTGGATATCAAA |
| VY002 | 2415 | HCDR1 | GFTFSNAW |
| | 2416 | HCDR2 | IKSKTDGGTT |
| | 2417 | HCDR3 | VTDYPKDV |
| | 2348 | FR H1 | EVQLVESGGGLVKPGGSLRLSCAAS |
| | 2418 | FR H2 | MSWVRQAPGKGLEWFGR |
| | 2419 | FR H3 | DYAAPVKGRFTISRDDSKNTLYLQMNSLKTEDTAVYYC |
| | 2261 | FR H4 | WGQGTTVTVSS |
| | 2420 | LCDR1 | QSVLYSSKNKNY |
| | 2421 | LCDR2 | WAS |
| | 2422 | LCDR3 | QQYYSSPYT |
| | 2423 | FR L1 | DIVMTQSPDSLAVSLGERATINCKSS |
| | 2424 | FR L2 | LAWYQQKPGQPPKLLIY |
| | 2425 | FR L3 | TRESGVPDRFSGSGSGTDFTLAISSLQAEDVAVYYC |
| | 2308 | FR L4 | FGQGTKLEIK |
| | 2426 | VH | EVQLVESGGGLVKPGGSLRLSCAASGFTFSNAWMSWVRQAP |
| | | | GKGLEWFGRIKSKTDGGTTDYAAPVKGRFTISRDDSKNTLY |
| | | | LQMNSLKTEDTAVYYCVTDYPKDVWGQGTTVTVSS |
| | 2427 | VL | DIVMTQSPDSLAVSLGERATINCKSSQSVLYSSKNKNYLAW |
| | | | YQQKPGQPPKLLIYWASTRESGVPDRFSGSGSGTDFTLAIS |
| | | | SLQAEDVAVYYCQQYYSSPYTFGQGTKLEIK |
| | 2428 | VH (DNA) | GAGGTGCAGCTGGTGGAGTCTGGGGGAGGCTTGGTAAAGCC |
| | | | TGGGGGGTCCCTTAGACTCTCCTGTGCAGCCTCTGGATTCA |
| | | | CTTTCAGTAACGCCTGGATGAGCTGGGTCCGCCAGGCTCCA |
| | | | GGGAAGGGGCTGGAGTGGTTTGGCCGTATTAAAAGCAAAAC |
| | | | TGATGGTGGGACAACAGACTACGCTGCACCCGTGAAAGGCA |
| | | | GATTCACCATCTCAAGAGATGACTCAAAAAACACGCTGTAT |
| | | | CTGCAAATGAACAGCCTGAAAACCGAGGACACAGCCGTGTA |
| | | | TTACTGTGTCACAGATTACCCGAAGGACGTCTGGGGCCAAG |
| | | | GGACCACGGTCACCGTCTCCTCA |
| | 2429 | VL (DNA) | GACATCGTGATGACCCAGTCTCCAGACTCCCTGGCTGTGTC |
| | | | TCTGGGCGAGAGGGCCACCATCAACTGCAAGTCCAGCCAGA |
| | | | GTGTTTTATACAGCTCCAAAAATAAGAACTACTTAGCTTGG |
| | | | TACCAGCAGAAACCAGGACAGCCTCCTAAGCTGCTCATTTA |
| | | | CTGGGCATCTACCCGGGAATCCGGGGTCCCTGACCGATTCA |
| | | | GTGGCAGCGGGTCTGGGACAGATTTCACTCTCGCCATCAGC |
| | | | AGCCTGCAGGCTGAAGATGTGGCAGTTTATTACTGTCAGCA |
| | | | ATATTATAGTAGTCCGTACACTTTTGGCCAGGGGACCAAGC |
| | | | TGGAGATCAAA |
| VY014 | 2430 | HCDR1 | GFTFNNYD |
| | 2431 | HCDR2 | IGAAGDT |
| | 2432 | HCDR3 | ARAGETLEGATIGYYYGMDV |
| | 2221 | FR H1 | [sequence omitted] |
| | 2433 | FR H2 | MHWVRQAAGKGLEWVST |
| | 2434 | FR H3 | YYPGSVKGRFIISRENAKNSLYLQMNSLRAGDTAVYYC |
| | 2261 | FR H4 | WGQGTTVTVSS |
| | 2435 | LCDR1 | QSLLHSNGYNY |
| | 2436 | LCDR2 | LGS |
| | 2437 | LCDR3 | MQALQIPLT |
| | 2438 | FR L1 | DILMTQSPLSLPVTPGEPASISCRSS |
| | 2439 | FR L2 | LDWYLQKPGQSPQLLIY |
| | 2440 | FR L3 | NRASGVPDRFSGSGSGTDFTLKFSRVEAEDVGLYYC |
| | 2213 | FR L4 | FGGGTKVEIK |
| | 2441 | VH | EVQLVESGGGLVQPGGSLRLSCAASGFTENNYDMHWVRQAA |
| | | | GKGLEWVSTIGAAGDTYYPGSVKGRFIISRENAKNSLYLQM |
| | | | NSLRAGDTAVYYCARAGETLEGATIGYYYGMDVWGQGTTVT |
| | | | VSS |
| | 2442 | VL | DILMTQSPLSLPVTPGEPASISCRSSQSLLHSNGYNYLDWY |
| | | | LQKPGQSPQLLIYLGSNRASGVPDRFSGSGSGTDFTLKFSR |
| | | | VEAEDVGLYYCMQALQIPLTFGGGTKVEIK |
| | 2443 | VH (DNA) | GAGGTGCAGCTGGTGGAGTCTGGGGGAGGCTTGGTACAGCC |
| | | | TGGGGGGTCCCTGAGACTCTCCTGTGCAGCCTCTGGATTCA |
| | | | CCTTCAATAACTACGACATGCACTGGGTCCGCCAAGCTGCA |
| | | | GGAAAAGGTCTGGAGTGGGTCTCAACTATTGGTGCTGCTGG |
| | | | TGACACATATTATCCAGGCTCCGTGAAGGGCCGATTCATCA |
| | | | TCTCCAGAGAAAATGCCAAGAACTCCTTGTATCTTCAAATG |
| | | | AACAGCCTGAGAGCCGGGGACACGGCTGTGTATTACTGTGC |
| | | | AAGAGCCGGAGAGACCTTAGAGGGAGCTACTATCGGCTACT |
| | | | ACTACGGTATGGACGTCTGGGGCCAGGGGACCACGGTCACC |
| | | | GTCTCCTCA |
| | 2444 | VL (DNA) | GATATTCTGATGACTCAGTCTCCACTCTCCCTGCCCGTCAC |
| | | | CCCTGGAGAGCCGGCCTCCATCTCCTGCAGGTCTAGTCAGA |
| | | | GCCTCCTGCATAGTAATGGATACAACTATTTGGATTGGTAC |
| | | | CTGCAGAAGCCAGGGCAGTCTCCACAGCTCCTGATCTATTT |
| | | | GGGTTCTAATCGGGCCTCCGGGGTCCCTGACAGGTTCAGTG |
| | | | GCAGTGGATCAGGCACAGATTTTACACTGAAATTCAGCAGA |
| | | | GTGGAGGCTGAGGATGTTGGACTTTATTACTGCATGCAAGC |
| | | | TCTACAAATTCCGCTCACTTTCGGCGGAGGGACCAAGGTGG |
| | | | AGATCAAA |
| VY008 | 2445 | HCDR1 | GYTFTGYY |
| | 2446 | HCDR2 | INPNSGGT |
| | 2447 | HCDR3 | AGDAFDI |
| | 2448 | FR H1 | [sequence omitted] |
| | 2449 | FR H2 | MHWVRQAPGQGLEWMGW |
| | 2450 | FR H3 | NYAQKFQGRVTMTRDISISTAYMELSRLRSDDTAVYYC |
| | 2451 | FR H4 | WGQGTMVTVSS |
| | 2452 | LCDR1 | QSVLYSSNNKNY |
| | 2421 | LCDR2 | WAS |
| | 2453 | LCDR3 | QQYYSTPLT |
| | 2423 | FR L1 | DIVMTQSPDSLAVSLGERATINCKSS |
| | 2424 | FR L2 | LAWYQQKPGQPPKLLIY |
| | 2454 | FR L3 | TRESGVPDRFSGSGSGTDFTLTISSLQAEDVAVYYC |
| | 2213 | FR L4 | FGGGTKVEIK |
| | 2455 | VH | QVQLVQSGAEVKKPGASVKVSCKASGYTFTGYYMHWVRQAP |
| | | | GQGLEWMGWINPNSGGTNYAQKFQGRVTMIRDTSISTAYME |
| | | | LSRLRSDDTAVYYCAGDAFDIWGQGTMVTVSS |
| | 2456 | VL | DIVMTQSPDSLAVSLGERATINCKSSQSVLYSSNNKNYLAW |
| | | | YQQKPGQPPKLLIYWASTRESGVPDRFSGSGSGIDFTLTIS |
| | | | SLQAEDVAVYYCQQYYSTPLTFGGGTKVEIK |
| | 2457 | VH (DNA) | CAGGTGCAGCTGGTGCAGTCTGGGGCTGAGGTGAAGAAGCC |
| | | | TGGGGCCTCAGTGAAGGTCTCCTGCAAGGCTTCTGGATACA |
| | | | CCTTCACCGGCTACTATATGCACTGGGTGCGACAGGCCCCT |
| | | | GGACAAGGGCTTGAGTGGATGGGATGGATCAACCCTAACAG |
| | | | TGGTGGCACAAACTATGCACAGAAGTTTCAGGGCAGGGTCA |
| | | | CCATGACCAGGGACACGTCCATCAGCACAGCCTACATGGAG |
| | | | CTGAGCAGGCTGAGATCTGACGACACGGCCGTGTATTACTG |
| | | | TGCTGGGGATGCTTTTGATATCTGGGGCCAAGGGACAATGG |
| | | | TCACCGTCTCTTCA |
| | 2458 | VL (DNA) | GACATCGTGATGACCCAGTCTCCAGACTCCCTGGCTGTGTC |
| | | | TCTGGGCGAGAGGGCCACCATCAACTGCAAGTCCAGCCAGA |
| | | | GTGTTTTATACAGCTCCAACAATAAGAACTACTTAGCTTGG |
| | | | TACCAGCAGAAACCAGGACAGCCTCCTAAGCTGCTCATTTA |
| | | | CTGGGCATCTACCCGGGAATCCGGGGTCCCTGACCGATTCA |
| | | | GTGGCAGCGGGTCTGGGACAGATTTCACTCTCACCATCAGC |
| | | | AGCCTGCAGGCTGAAGATGTGGCAGTTTATTACTGTCAGCA |
| | | | ATATTATAGTACTCCGCTCACTTTCGGCGGAGGGACCAAGG |
| | | | TGGAGATCAAA |
| VY013 | 2459 | HCDR1 | GFSLINARMA |
| | 2460 | HCDR2 | IFSNDEK |
| | 2461 | HCDR3 | ARIRGYSYNYGMDV |
| | 2462 | FR H1 | QVTLKESGPVLVKPTETLTLTCTVS |
| | 2463 | FR H2 | VSWIRQPPGKALEWLAH |
| | 2464 | FR H3 | SYSTSLKSRLTISKDTSKSQVVLIMINMDPVDTATYYC |
| | 2261 | FR H4 | WGQGTTVTVSS |
| | 2465 | LCDR1 | QSLLHSNGYIY |
| | 2466 | LCDR2 | VGS |
| | 2467 | LCDR3 | MQTLQIPRT |
| | 2468 | FR L1 | DIVMTQSPLSLPVIPGEPASISCRSS |
| | 2439 | FR L2 | LDWYLQKPGQSPQLLIY |
| | 2469 | FR L3 | NRASGVPDRFSGSGSGTDFKLKISRVEAEDVGVYYC |
| | 2213 | FR L4 | FGGGTKVEIK |
| | 2470 | VH | QVTLKESGPVLVKPTETLTLTCTVSGFSLINARMAVSWIRQ |
| | | | PPGKALEWLAHIFSNDEKSYSTSLKSRLTISKDTSKSQVVL |
| | | | IMTNMDPVDTATYYCARIRGYSYNYGMDVWGQGTTVTVSS |
| | 2471 | VL | DIVMTQSPLSLPVIPGEPASISCRSSQSLLHSNGYIYLDWY |
| | | | LQKPGQSPQLLIYVGSNRASGVPDRFSGSGSGTDFKLKISR |
| | | | VEAEDVGVYYCMQTLQIPRTFGGGTKVEIK |
| | 2472 | VH (DNA) | CAGGTCACCTTGAAGGAGTCTGGTCCTGTGCTGGTGAAACC |
| | | | CACAGAGACCCTCACGCTGACCTGCACCGTCTCTGGGTTCT |
| | | | CACTCATCAATGCTAGAATGGCTGTGAGCTGGATCCGTCAG |
| | | | CCCCCAGGGAAGGCCCTGGAGTGGCTTGCACACATTTTTTC |
| | | | GAATGACGAAAAATCCTACAGCACATCTCTGAAGAGCAGAC |
| | | | TCACCATCTCCAAGGACACCTCCAAAAGCCAGGTGGTCCTT |
| | | | ATCATGACCAACATGGACCCTGTGGACACAGCCACATATTA |
| | | | CTGTGCACGGATCCGTGGATACAGCTATAACTACGGTATGG |
| | | | ACGTCTGGGGCCAAGGGACCACGGTCACCGTCTCCTCA |
| | 2473 | VL (DNA) | GATATTGTGATGACTCAGTCTCCACTCTCCCTGCCCGTCAT |
| | | | CCCTGGAGAGCCGGCCTCCATCTCCTGCAGGTCTAGTCAGA |
| | | | GCCTCCTGCATAGTAATGGATACATCTATTTGGATTGGTAC |
| | | | CTGCAGAAGCCAGGGCAGTCTCCACAGCTCCTGATCTATGT |
| | | | GGGTTCTAATCGGGCCTCCGGGGTCCCTGACAGGTTCAGTG |
| | | | GCAGTGGATCAGGCACAGATTTCAAACTGAAAATCAGCAGA |
| | | | GTGGAGGCTGAGGATGTTGGGGTTTATTACTGCATGCAAAC |
| | | | TCTACAAATTCCGCGCACTTTCGGCGGAGGGACCAAGGTGG |
| | | | AGATCAAA |

TABLE 15
Variable domain CDR amino acid sequence sets

| | Variable | CDR1 SEQ | CDR2 SEQ | CDR3 SEQ |
|---|---|---|---|---|
| ID# | domain | ID NO | ID NO | ID NO |
| VY003 | VH | 2273 | 2274 | 2275 |
| VY016 | VH | 2284 | 2285 | 2286 |
| VY007 | VH | 2218 | 2219 | 2220 |
| VY004 | VH | 2232 | 2233 | 2234 |
| VY017 | VH | 2284 | 2299 | 2300 |
| VY006 | VH | 2248 | 2219 | 2249 |
| VY011 | VH | 2200 | 2201 | 2202 |
| VY012 | VH | 2313 | 2314 | 2315 |
| VY009 | VH | 2330 | 2331 | 2332 |
| VY010 | VH | 2345 | 2346 | 2347 |
| VY022 | VH | 2345 | 2346 | 2347 |
| VY018 | VH | 2200 | 2257 | 2258 |
| VY001 | VH | 2371 | 2372 | 2373 |
| VY019 | VH | 2381 | 2382 | 2383 |
| VY020 | VH | 2284 | 2392 | 2393 |
| VY005 | VH | 2284 | 2392 | 2393 |
| VY002 | VH | 2415 | 2416 | 2417 |
| VY014 | VH | 2430 | 2431 | 2432 |
| VY008 | VH | 2445 | 2446 | 2447 |
| VY013 | VH | 2459 | 2460 | 2461 |
| VY003 | VL | 2207 | 2208 | 2277 |
| VY016 | VL | 2289 | 2290 | 2291 |
| VY007 | VL | 2207 | 2208 | 2224 |
| VY004 | VL | 2238 | 2239 | 2240 |
| VY017 | VL | 2302 | 2303 | 2304 |
| VY006 | VL | 2207 | 2208 | 2224 |
| VY011 | VL | 2207 | 2208 | 2209 |
| VY012 | VL | 2319 | 2320 | 2321 |
| VY009 | VL | 2262 | 2336 | 2337 |
| VY010 | VL | 2351 | 2352 | 2353 |
| VY022 | VL | 2361 | 2362 | 2363 |
| VY018 | VL | 2262 | 2263 | 2264 |
| VY001 | VL | 2207 | 2208 | 2224 |
| VY019 | VL | 2262 | 2263 | 2385 |
| VY020 | VL | 2396 | 2239 | 2397 |
| VY005 | VL | 2404 | 2405 | 2406 |
| VY002 | VL | 2420 | 2421 | 2422 |
| VY014 | VL | 2435 | 2436 | 2437 |
| VY008 | VL | 2452 | 2421 | 2453 |
| VY013 | VL | 2465 | 2466 | 2467 |

TABLE 16
Variable domain CDR amino acid sequence set pairs

| | HCDR1 SEQ | HCDR2 SEQ | HCDR3 SEQ | LCDR1 | LCDR2 | LCDR3 |
|---|---|---|---|---|---|---|
| ID# | ID NO | ID NO | ID NO | SEQ ID NO | SEQ ID NO | SEQ ID NO |
| VY003 | 2273 | 2274 | 2275 | 2207 | 2208 | 2277 |
| VY016 | 2284 | 2285 | 2286 | 2289 | 2290 | 2291 |
| VY007 | 2218 | 2219 | 2220 | 2207 | 2208 | 2224 |
| VY004 | 2232 | 2233 | 2234 | 2238 | 2239 | 2240 |
| VY017 | 2284 | 2299 | 2300 | 2302 | 2303 | 2304 |
| VY006 | 2248 | 2219 | 2249 | 2207 | 2208 | 2224 |
| VY011 | 2200 | 2201 | 2202 | 2207 | 2208 | 2209 |
| VY012 | 2313 | 2314 | 2315 | 2319 | 2320 | 2321 |
| VY009 | 2330 | 2331 | 2332 | 2262 | 2336 | 2337 |
| VY010 | 2345 | 2346 | 2347 | 2351 | 2352 | 2353 |
| VY022 | 2345 | 2346 | 2347 | 2361 | 2362 | 2363 |
| VY018 | 2200 | 2257 | 2258 | 2262 | 2263 | 2264 |
| VY001 | 2371 | 2372 | 2373 | 2207 | 2208 | 2224 |
| VY019 | 2381 | 2382 | 2383 | 2262 | 2263 | 2385 |
| VY020 | 2284 | 2392 | 2393 | 2396 | 2239 | 2397 |
| VY005 | 2284 | 2392 | 2393 | 2404 | 2405 | 2406 |
| VY002 | 2415 | 2416 | 2417 | 2420 | 2421 | 2422 |
| VY014 | 2430 | 2431 | 2432 | 2435 | 2436 | 2437 |
| VY008 | 2445 | 2446 | 2447 | 2452 | 2421 | 2453 |
| VY013 | 2459 | 2460 | 2461 | 2465 | 2466 | 2467 |

TABLE 17
Constant Regions of Heavy Chains and Light Chains

| SEQ | | |
|---|---|---|
| ID | | |
| NO | Description | Sequence |
| 2474 | Constant | AKITPPSVYPLAPGSAAQTNSMVTLGCLVKGYFPEPVTVTWNSGSLSSGVHT |
| | Region of | FPAVLQSDLYTLSSSVTVPSSPRPSETVTCNVAHPASSTKVDKKIVPRDCGC |
| | Heavy | KPCICTVPEVSSVFIFPPKPKDVLTITLTPKVTCVVVDISKDDPEVQFSWFV |
| | Chain, | DDVEVHTAQTQPREEQFNSTFRSVSELPIMHQDWLNGKEFKCRVNSAAFPAP |
| | secreted | IEKTISKTKGRPKAPQVYTIPPPKEQMAKDKVSLICMITDFFPEDITVEWQW |
| | form | NGQPAENYKNTQPIMNINGSYFVYSKLNVQKSNWEAGNTFTCSVLHEGLHNH |
| | (mIgG1) | HTEKSLSHSPGK |
| 2475 | Constant | AKTTPPSVYPLAPGSAAQTNSMVTLGCLVKGYFPEPVTVTWNSGSLSSGVHT |
| | Region of | FPAVLQSDLYTLSSSVTVPSSPRPSETVTCNVAHPASSTKVDKKIVPRDCGC |
| | Heavy | KPCICTVPEVSSVFIFPPKPKDVLTITLTPKVTCVVVDISKDDPEVQFSWFV |
| | Chain, | DDVEVHTAQTQPREEQFNSTFRSVSELPIMHQDWLNGKEFKCRVNSAAFPAP |
| | membrane- | IEKTISKTKGRPKAPQVYTIPPPKEQMAKDKVSLTCMITDFFPEDITVEWQW |
| | bound form | NGQPAENYKNTQPIMNINGSYFVYSKLNVQKSNWEAGNTFTCSVLHEGLHNH |
| | (mIgG1) | HTEKSLSHSPGLQLDETCAEAQDGELDGLWTTITIFISLFLLSVCYSAAVTL |
| | | FKVKWIFSSVVELKQTLVPEYKNMIGQAP |
| 2476 | Constant | AKTTAPSVYPLAPVCGDTTGSSVTLGCLVKGYFPEPVTLTWNSGSLSSGVHT |
| | Region of | FPAVLQSDLYTLSSSVTVISSTWPSQSITCNVAHPASSTKVDKKIEPRGPTI |
| | murine | KPCPPCKCPAPNLLGGPSVFIFPPKIKDVLMISLSPIVTCVVVDVSEDDPDV |
| | Heavy | QISWFVNNVEVHTAQTQTHREDYNSTLRVVSALPIQHQDWMSGKEFKCKVNN |
| | Chain, | KDLPAPIERTISKPKGSVRAPQVYVLPPPEEEMTKKQVTLTCMVTDEMPEDI |
| | (mIgG2A) | YVEWINNGKTELNYKNTEPVLDSDGSYFMYSKLRVEKKNWVERNSYSCSVVH |
| | | EGLHNHHTTKSFSRTPGK |
| 2477 | DNA | GCTAAAACAACAGCCCCATCGGTCTATCCACTGGCCCCTGTGTGTGGAGATA |
| | Constant | CAACTGGCTCCTCGGTGACTCTAGGATGCCTGGTCAAGGGTTATTTCCCTGA |
| | Region of | GCCAGTGACCTTGACCTGGAACTCTGGATCCCTGTCCAGTGGTGTGCACACC |
| | Heavy | TTCCCAGCTGTCCTGCAGTCTGACCTCTACACCCTCAGCAGCTCAGTGACTG |
| | Chain | TAACCTCGAGCACCTGGCCCAGCCAGTCCATCACCTGCAATGTGGCCCACCC |
| | (mIgG2A) | GGCAAGCAGCACCAAGGTGGACAAGAAAATTGAGCCCAGAGGGCCCACAATC |
| | | AAGCCCTGTCCTCCATGCAAATGCCCAGCACCTAACCTCTTGGGTGGACCAT |
| | | CCGTCTTCATCTTCCCTCCAAAGATCAAGGATGTACTCATGATCTCCCTGAG |
| | | CCCCATAGTCACATGTGTGGTGGTGGATGTGAGCGAGGATGACCCAGATGTC |
| | | CAGATCAGCTGGTTTGTGAACAACGTGGAAGTACACACAGCTCAGACACAAA |
| | | CCCATAGAGAGGATTACAACAGTACTCTCCGGGTGGTCAGTGCCCTCCCCAT |
| | | CCAGCACCAGGACTGGATGAGTGGCAAGGAGTTCAAATGCAAGGTCAACAAC |
| | | AAAGACCTCCCAGCGCCCATCGAGAGAACCATCTCAAAACCCAAAGGGTCAG |
| | | TAAGAGCTCCACAGGTATATGTCTTGCCTCCACCAGAAGAAGAGATGACTAA |
| | | GAAACAGGTCACTCTGACCTGCATGGTCACAGACTTCATGCCTGAAGACATT |
| | | TACGTGGAGTGGACCAACAACGGGAAAACAGAGCTAAACTACAAGAACACTG |
| | | AACCAGTCCTGGACTCTGATGGTTCTTACTTCATGTACAGCAAGCTGAGAGT |
| | | GGAAAAGAAGAACTGGGTGGAAAGAAATAGCTACTCCTGTTCAGTGGTCCAC |
| | | GAGGGTCTGCACAATCACCACACGACTAAGAGCTTCTCCCGGACTCCGGGTA |
| | | AA |
| 2478 | Constant | AKTTAPSVYPLVPVCGGTTGSSVTLGCLVKGYFPEPVTLTWNSGSLSSGVHT |
| | Region of | FPALLQSGLYTLSSSVTVTSNTWPSQTITCNVAHPASSTKVDKKIEPRVPIT |
| | Heavy | QNPCPPHQRVPPCAAPDLLGGPSVFIFPPKIKDVLMISLSPMVTCVVVDVSE |
| | Chain, | DDPDVQISWFVNNVEVHTAQTQTHREDYNSTLRVVSALPIQHQDWMSGKEFK |
| | secreted | CKVNNRALPSPIEKTISKPRGPVRAPQVYVLPPPAEEMTKKEFSLICMITGF |
| | form | LPAEIAVDWTSNGRTEQNYKNTATVLDSDGSYFMYSKLRVQKSTWERGSLFA |
| | (mIgG2A) | CSVVHEVLHNHLTTKTISRSLGK |
| 2479 | Constant | KTIPPSVYPLAPGCGDTTGSSVTLGCLVKGYFPESVTVTWNSGSLSSSVHTF |
| | Region of | PALLQSGLYTMSSSVTVPSSTWPSQTVTCSVAHPASSTTVDKKLEPSGPIST |
| | murine | INPCPPCKECHKCPAPNLEGGPSVFIFPPNIKDVLMISLIPKVTCVVVDVSE |
| | Heavy | DDPDVQISWFVNNVEVHTAQTQTHREDYNSTIRVVSTLPIQHQDWMSGKEFK |
| | Chain, | CKVNNKDLPSPIERTISKIKGLVRAPQVYILPPPAEQLSRKDVSLTCLVVGF |
| | secreted | NPGDISVEWISNGHTEENYKDTAPVLDSDGSYFIYSKLNMKTSKWEKTDSFS |
| | form | CNVRHEGLKNYYLKKTISRSPGLDLDDICAEAKDGELDGLWTTITIFISLFL |
| | (mIgG2B) | LSVCYSASVTLFKVKWIFSSVVELKQKISPDYRNMIGQGA |
| 2480 | Constant | KITAPSVYPLAPVCGGTTGSSVTLGCLVKGYFPEPVILIWNSGSLSSGVHTF |
| | Region of | PALLQSGLYTLSSSVTVTSNTWPSQTITCNVAHPASSTKVDKKIEPRVPITQ |
| | murine | NPCPPLKECPPCAAPDLLGGPSVFIFPPKIKDVLMISLSPMVTCVVVDVSED |
| | Heavy | DPDVQISWFVNNVEVHTAQTQTHREDYNSTLRVVSALPIQHQDWMSGKEFKC |
| | Chain, | KVNNRALPSPIEKTISKPRGPVRAPQVYVLPPPAEEMIKKEFSLTCMITGFL |
| | (mIgG2B) | PAEIAVDWTSNGRTEQNYKNTATVLDSDGSYFMYSKLRVQKSTWERGSLFAC |
| | | SVVHEGLHNHLTTKTISRSLGLDLDDVCTEAQDGELDGLWITITIFISLFLL |
| | | SVCYSASVTLFKVKWIFSSVVELKQKISPDYRNMIGQGA |
| 2481 | Constant | TTTAPSVYPLVPGCSDTSGSSVTLGCLVKGYFPEPVTVKWNYGALSSGVRTV |
| | Region of | SSVLQSGFYSLSSLVTVPSSTWPSQTVICNVAHPASKTELIKRIEPRIPKPS |
| | murine | TPPGSSCPPGNILGGPSVFIFPPKPKDALMISLTPKVTCVVVDVSEDDPDVH |
| | Heavy | VSWFVDNKEVHTAWTQPREAQYNSTFRVVSALPIQHQDWMRGKEFKCKVNNK |
| | Chain, | ALPAPIERTISKPKGRAQTPQVYTIPPPREQMSKKKVSLTCLVTNFFSEAIS |
| | secreted | VEWERNGELEQDYKNTPPILDSDGTYFLYSKLTVDTDSWLQGEIFTCSVVHE |
| | form | ALHNHHTQKNLSRSPELELNETCAEAQDGELDGLWTTITIFISLFLLSVCYS |
| | (mIgG3) | ASVTLFKVKWIFSSVVQVKQTAIPDYRNMIGQGA |
| 2482 | Constant | ADAAPTVSIFPPSSEQLTSGGASVVCFLNNFYPKDINVKWKIDGSERQNGVL |
| | Region of | NSWTDQDSKDSTYSMSSTLTLTKDEYERHNSYTCEATHKTSTSPIVKSENRN |
| | Murine | EC |
| | Kappa Light | |
| | Chain | |
| 2483 | DNA | GCAGATGCTGCACCAACTGTATCCATCTTCCCACCATCCAGTGAGCAGTTAA |
| | Constant | CATCTGGAGGTGCCTCAGTCGTGTGCTTCTTGAACAACTTCTACCCCAAAGA |
| | Region of | CATCAATGTCAAGTGGAAGATTGATGGCAGTGAACGACAAAATGGCGTCCTG |
| | Murine | AACAGTTGGACTGATCAGGACAGCAAAGACAGCACCTACAGCATGAGCAGCA |
| | Kappa Light | CCCTCACGTTGACCAAGGACGAGTATGAACGACATAACAGCTATACCTGTGA |
| | Chain | GGCCACTCACAAGACATCAACTTCACCCATTGTCAAGAGCTTCAACAGGAAT |
| | | GAGTGT |
| 2484 | Constant | QPKSSPSVTLFPPSSEELEINKATLVCTITDFYPGVVTVDWKVDGTPVTQGM |
| | Region of | ETTQPSKQSNNKYMASSYLILTARAWERHSSYSCQVTHEGHTVEKSLSRADC |
| | murine | S |
| | Lambda | |
| | Light Chain | |
| | (subclass 1) | |
| 2485 | Constant | QPKSTPTLTVFPPSSEELKENKATLVCLISNFSPSGVTVAWKANGTPITQGV |
| | Region of | DTSNPTKEGNKFMASSFLHLTSDQWRSHNSFTCQVTHEGDTVEKSLSPAECL |
| | murine | |
| | Lambda | |
| | Light Chain | |
| | (subclass 2) | |
| 2486 | Constant | QPKSTPTLTMFPPSPEELQENKATLVCLISNFSPSGVTVAWKANGTPITQGV |
| | Region of | DTSNPTKEDNKYMASSFLHLTSDQWRSHNSFTCQVTHEGDTVEKSLSPAECL |
| | murine | |
| | Lambda | |
| | Light Chain | |
| | (subclass 3) | |
| 2487 | Constant | ASTKGPSVFPLAPSSKSTSGGTAALGCLVKDYFPEPVTVSWNSGALTSGVHT |
| | Region of | FPAVLQSSGLYSLSSVVTVPSSSLGTQTYICNVNHKPSNTKVDKRVEPKSCD |
| | human | KTHTCPPCPAPELLGGPSVFLFPPKPKDTLMISRTPEVTCVVVDVSHEDPEV |
| | Heavy | KFNWYVDGVEVHNAKTKPREEQYNSTYRVVSVLIVLHQDWLNGKEYKCKVSN |
| | Chain | KALPAPIEKTISKAKGQPREPQVYTLPPSREEMTKNQVSLTCLVKGFYPSDI |
| | (hIgG1) | AVEWESNGQPENNYKTTPPVLDSDGSFFLYSKLTVDKSRWQQGNVFSCSVMH |
| | | EALHNHYTQKSLSLSPG |
| 2488 | DNA | GCCAGCACAAAAGGGCCCAGTGTGTTCCCGCTCGCACCAAGCAGCAAATCAA |
| | Constant | CGTCAGGCGGCACAGCCGCGTTGGGTTGCCTTGTAAAAGACTACTTCCCAGA |
| | Region of | ACCAGTTACGGTGTCATGGAACAGTGGTGCACTCACGAGCGGCGTTCATACC |
| | human | TTCCCCGCCGTACTTCAGAGTTCAGGTCTTTACTCACTTTCCAGCGTGGTCA |
| | Heavy | CAGTACCGTCAAGCTCTCTTGGAACACAGACATATATCTGTAACGTAAATCA |
| | Chain | TAAGCCTAGCAATACCAAAGTCGATAAACGAGTGGAACCCAAGAGTTGTGAT |
| | (hIgG1) | AAAACCCACACCTGTCCCCCTTGCCCGGCACCGGAACTGCTGGGTGGTCCAT |
| | | CAGTATTCTTGTTTCCGCCTAAGCCAAAGGACACACTGATGATATCCAGAAC |
| | | TCCAGAGGTTACGTGCGTAGTCGTGGACGTCAGTCATGAAGACCCCGAAGTT |
| | | AAGTTCAACTGGTACGTGGATGGTGTGGAAGTACATAATGCGAAGACGAAAC |
| | | CCAGGGAAGAACAATATAACTCAACTTATAGGGTAGTCAGCGTCTTGACTGT |
| | | ACTTCACCAAGATTGGTTGAATGGCAAAGAGTACAAATGCAAGGTAAGCAAC |
| | | AAAGCATTGCCTGCGCCAATCGAAAAGACTATCTCAAAAGCAAAGGGCCAGC |
| | | CACGCGAACCACAAGTGTATACATTGCCGCCCAGTCGGGAAGAAATGACGAA |
| | | AAATCAAGTCAGTCTCACATGCCTCGTGAAAGGATTTTATCCCTCTGACATA |
| | | GCTGTGGAGTGGGAAAGTAATGGCCAACCCGAAAATAATTACAAAACGACGC |
| | | CTCCCGTTTTGGACTCAGATGGGAGTTTTTTCCTTTACAGTAAGCTGACGGT |
| | | TGACAAAAGCAGGTGGCAACAAGGGAACGTCTTTTCTTGTAGTGTGATGCAT |
| | | GAGGCGCTCCACAATCATTACACTCAAAAATCCTTGAGCCTGTCTCCAGGC |
| 2489 | Constant | ASTKGPSVFPLAPCSRSTSESTAALGCLVKDYFPEPVTVSWNSGALISGVHT |
| | Region of | FPAVLQSSGLYSLSSVVTVPSSNFGTQTYTCNVDHKPSNTKVDKTVERKCCV |
| | Heavy | ECPPCPAPPVAGPSVFLFPPKPKDTLMISRTPEVTCVVVDVSHEDPEVQFNW |
| | Chain | YVDGVEVHNAKTKPREEQFNSTFRVVSVLTVVHQDWLNGKEYKCKVSNKGLP |
| | (hIgG2) | APIEKTISKTKGQPREPQVYTLPPSREEMTKNQVSLTCLVKGFYPSDISVEW |
| | | ESNGQPENNYKTTPPMLDSDGSFFLYSKLTVDKSRWQQGNVFSCSVMHEALH |
| | | NHYTQKSLSLSPGK |
| 2490 | Constant | ASTKGPSVFPLAPCSRSTSGGTAALGCLVKDYFPEPVTVSWNSGALTSGVHT |
| | Region of | FPAVLQSSGLYSLSSVVTVPSSSLGTQTYTCNVNHKPSNTKVDKRVELKTPL |
| | Heavy | GDTTHTCPRCPEPKSCDTPPPCPRCPEPKSCDTPPPCPRCPEPKSCDTPPPC |
| | Chain | PRCPAPELLGGPSVFLFPPKPKDTLMISRTPEVTCVVVDVSHEDPEVQFKWY |
| | (hIgG3) | VDGVEVHNAKTKPREEQYNSTFRVVSVLTVLHQDWLNGKEYKCKVSNKALPA |
| | | PIEKTISKTKGQPREPQVYTLPPSREEMTKNQVSLTCLVKGFYPSDIAVEWE |
| | | SSGQPENNYNTTPPMLDSDGSFFLYSKLTVDKSRWQQGNIFSCSVMHEALHN |
| | | RFTQKSLSLSPGK |
| 2491 | Constant | ASTKGPSVFPLAPCSRSTSESTAALGCLVKDYFPEPVTVSWNSGALTSGVHT |
| | Region of | FPAVLQSSGLYSLSSVVTVPSSSLGTKTYTCNVDHKPSNTKVDKRVESKYGP |
| | human | PCPSCPAPEFLGGPSVFLFPPKPKDTLMISRTPEVTCVVVDVSQEDPEVQFN |
| | Heavy | WYVDGVEVHNAKTKPREEQFNSTYRVVSVLTVLHQDWLNGKEYKCKVSNKGL |
| | Chain | PSSIEKTISKAKGQPREPQVYTLPPSQEEMTKNQVSLTCLVKGFYPSDIAVE |
| | (hIgG4) | WESNGQPENNYKTTPPVLDSDGSFFLYSRLTVDKSRWQEGNVFSCSVMHEAL |
| | | HNHYTQKSLSLSLGK |
| 2492 | Constant | GQPKANPTVTLFPPSSEELQANKATLVCLISDFYPGAVTVAWKADGSPVKAG |
| | Region of | VETTKPSKQSNNKYAASSYLSLTPEQWKSHRSYSCQVTHEGSTVEKTVAPTE |
| | human | CS |
| | Light Chain | |
| | (hIgG | |
| | Lambda, | |
| | subclass 1) | |
| 2493 | Constant | GQPKAAPSVTLFPPSSEELQANKATLVCLISDFYPGAVTVAWKADSSPVKAG |
| | Region of | VETTTPSKQSNNKYAASSYLSLTPEQWKSHRSYSCQVTHEGSTVEKTVAPTE |
| | human | CS |
| | Light Chain | |
| | (hIgG | |
| | Lambda, | |
| | subclass 2) | |
| 2494 | Constant | GQPKAAPSVTLFPPSSEELQANKATLVCLISDFYPGAVTVAWKADSSPVKAG |
| | Region of | VETTTPSKQSNNKYAASSYLSLTPEQWKSHKSYSCQVTHEGSTVEKTVAPTE |
| | human | CS |
| | Light Chain | |
| | (hIgG | |
| | Lambda, | |
| | subclass 3) | |
| 2495 | Constant | GQPKAAPSVTLFPPSSEELQANKATLVCLISDFYPGAVKVAWKADGSPVNTG |
| | Region of | VETTTPSKQSNNKYAASSYLSLTPEQWKSHRSYSCQVTHEGSTVEKTVAPAE |
| | human | CS |
| | Light Chain | |
| | (hIgG | |
| | Lambda, | |
| | subclass 6) | |
| 2496 | Constant | GQPKAAPSVTLFPPSSEELQANKATLVCLVSDENPGAVTVAWKADGSPVKVG |
| | Region of | VETTKPSKQSNNKYAASSYLSLTPEQWKSHRSYSCRVTHEGSTVEKTVAPAE |
| | human | CS |
| | Light Chain | |
| | (hIgG | |
| | Lambda, | |
| | subclass 7) | |
| 2497 | Constant | TVAAPSVFIFPPSDEQLKSGTASVVCLLNNFYPREAKVQWKVDNALQSGNSQ |
| | Region of | ESVTEQDSKDSTYSLSSTLILSKADYEKHKVYACEVTHQGLSSPVTKSENRG |
| | human | EC |
| | Light Chain | |
| | (hIgG | |
| | Kappa) | |
| 2498 | DNA | ACTGTCGCAGCACCTTCTGTCTTCATCTTTCCGCCAAGCGATGAACAGTTGA |
| | Constant | AATCTGGAACAGCGTCCGTGGTGTGCCTGCTCAACAACTTCTATCCTCGGGA |
| | Region of | AGCGAAGGTGCAATGGAAGGTAGATAATGCTCTTCAGAGTGGCAATTCCCAA |
| | human | GAGTCAGTTACGGAGCAAGATAGCAAGGACAGCACGTATTCCCTGTCTAGTA |
| | Light Chain | CGTTGACTCTTTCCAAGGCTGACTATGAAAAGCACAAGGTGTATGCCTGTGA |
| | (hIgG | AGTAACCCACCAAGGTCTCTCAAGTCCTGTAACTAAGAGCTTTAATCGAGGA |
| | kappa) | GAATGC |

[1495] In some embodiments, an anti-tau antibody molecule may include CDRs identified through CDR analysis of variable domain sequences presented herein via co-crystallography with bound antigen; by computational assessments based on comparisons with other antibodies (e.g., see Strohl, W. R. Therapeutic Antibody Engineering. Woodhead Publishing, Philadelphia PA. 2012. Ch. 3, p47-54); or Kabat, Chothia, Al-Lazikani, Lefranc, or Honegger numbering schemes, as described previously.

[1496] In some embodiments, the AAV particles may comprise a viral genome, wherein one or more components may be codon-optimized. Codon-optimization may be achieved by any method known to one with skill in the art such as, but not limited to, by a method according to Genescript, EMBOSS, Bioinformatics, NUS, NUS2, Geneinfinity, IDT, NUS3, GregThatcher, Insilico, Molbio, N2P, Snapgene, and/or VectorNTI. Antibody heavy and/or light chain sequences within the same viral genome may be codon-optimized according to the same or according to different methods.

[1497] In some cases, such variants may include bispecific antibodies. Bispecific antibodies encoded by payload regions may comprise variable domain pairs from two different antibodies.

[1498] In some embodiments, the AAV particles may comprise a heavy and a light chain of an antibody described herein and two promoters. As a non-limiting example, the AAV particles may comprise a nucleic acid sequence of a genome as described in FIG. 1 or FIG. 2 of US Patent Publication No. US20030219733, the contents of which are herein incorporated by reference in their entirety. As another non-limiting example, the AAV particles may be a dual-promoter AAV for antibody expression as described by Lewis et al. (J. of. Virology, Sept 2002, Vol. 76(17), p 8769-8775; the contents of which are herein incorporated by reference in their entirety).

[1499] Payload regions of the viral genomes may encode any anti-tau antibody molecules, or tau-associated antibody molecules, not limited to those described in Tables 7-16, including antibodies that are known in the art and/or antibodies that are commercially available.

[1500] Anti-tau antibody molecules that may be encoded by payloads include, but are not limited to, AT8 (pSer²¹²/pThr²⁰⁵; ThermoFisher, Waltham, MA; described in International Publication No. WO1995017429, the contents of which are herein incorporated in their entirety), AT100 (pThr²¹²/pSer²¹⁴; ThermoFisher, Waltham, MA; described in U.S. Pat. No. 6,121,003, the contents of which are herein incorporated in their entirety), AT180 (pThr²³¹; ThermoFisher, Waltham, MA; described in International Publication No. WO1995017429, the contents of which are herein incorporated by reference in their entirety), MC-1 (or MC1) (Tau^{2-18/312-342} conformational antibody; as described in International Publication WO199620218, the contents of which are herein incorporated by reference in their entirety), MC-6 (pSer²³⁵; described in U.S. Pat. No. 5,811,310, the contents of which are herein incorporated in their entirety), TG-3 (pThr²³¹; described in Jicha, G A et al., 1997 J Neurochem 69(5):2087-95, the contents of which are herein incorporated by reference in their entirety), CP13 (pSer²⁰²), CP27 (human Tau¹³⁰⁻¹⁵⁰), Tau12 (human Tau⁹⁻¹⁸; Abcam, Cambridge, MA), TG5 (Tau²²⁰⁻²⁴²; described in U.S. Pat. No. 5,811,310), DA9 (Tau¹⁰²⁻¹⁴⁰; described in U.S. Pat. No. 5,811,310), PHF1 (or PHF-1) (pSer³⁹⁶/pSer⁴⁰⁴; described in International Publication WO199620218), Alz50 (Tau⁷⁻⁹ and Tau³¹²⁻³⁴² conformational epitope; described in U.S. Pat. No. 5,811,310 and Carmel, G et al 1996 J Biol Chem 271(51):32780-32795 and Jicha, G A et al, 1997 J Neurosci Res 48(2):128-132, the contents of each of which are herein incorporated by reference in their entirety), Tau-1 (de-phosphorylated Ser¹⁹⁵/Ser¹⁹⁸/Ser¹⁹⁹/Ser²⁰²; ThermoFisher, Waltham, MA), Tau46 (Tau⁴⁰⁴⁻⁴⁴¹; Abcam, Cambridge, MA), pS199 (ThermoFisher, Waltham, MA), pT205, pS396 (ThermoFisher, Waltham, MA; described in U.S. Pat. No. 8,647,631, the contents of which are herein incorporated by reference in their entirety), pS404 (ThermoFisher, Waltham, MA; described in U.S. Pat. No. 8,647,631, the contents of which are herein incorporated by reference in their entirety), pS422 (ThermoFisher, Waltham, MA), A0024 (hTau²⁴³⁻⁴⁴¹; Dako, Glostrup, Denmark), HT7 (hTau¹⁵⁹⁻¹⁶³; ThermoFisher, Waltham, MA), Tau2 (hTau⁵²⁻⁶⁸; Abcam, Cambridge, MA), AD2 (pSer³⁹⁶/pSer⁴° 4; Bio-Rad Laboratories, Hercules, CA), AT120 (hTau²¹⁶⁻²²⁴; described in U.S. Pat. No. 5,843,779, the contents of which are herein incorporated by reference in their entirety), AT270 (pThr¹⁸¹; ThermoFisher, Waltham, MA), 12E8 (pSer²⁶² and/or Ser³⁵⁶), K9JA (hTau²⁴³⁻⁴⁴¹; Dako, Caprinteria, CA), TauC3 (hTau Asp441; Santa Cruz Biotechnology, Dallas, TX; described in United States Patent Publication US20120244174 and Gamblin, T C et al 2003 PNAS 100(17):10032-7, the contents of each of which are herein incorporated by reference in their entirety), 4E6G7 (pSer³⁹⁶/pSer⁴⁰⁴; described in United States Patent Publication No. US2010316564 and Congdon, E. E. et al., 2016. Molecular Neurodegeneration Aug 30; 11(1):62, the contents of which are herein incorporated by reference in their entirety), 6B2 and variants thereof, described in International Patent Publication WO2016007414, the contents of which are herein incorporated by reference in their entirety, RZ3 (pThr²³¹), PG5 (pSer⁴⁰⁹), BT2 (pS^{199/202}), DA31 (Tau¹⁵⁰⁻¹⁹⁰), CP9 (pThr²³¹) Ta1505 (phospho site between Tau⁴¹⁰⁻⁴²¹, particularly pSer⁴¹³ as described in United States Patent Publication US20150183854 and Umeda, T. et al., 2015. Ann Clin Trans Neurol 2(3): 241-255, the contents of each of which are herein incorporated by reference in their entirety), PHF-6 (pThr²³¹, as described in Hoffman R et al., 1997. Biochemistry 36; 8114-8124, the contents of which are herein incorporated by reference in their entirety), PHF-13 (pSer³⁹⁶, as described in Hoffman R et al., 1997. Biochemistry 36; 8114-8124), 16B5 (Tau²⁵⁻⁴⁶, as described in United States Publication US20160031976, the contents of which are herein incorporated by reference in their entirety), DC8E8 (as described in United States Patent Publication US20150050215, the contents of which are herein incorporated by reference in their entirety), PT1 or PT3 (as described in U.S. Pat. No. 9,371,376, the contents of which are herein incorporated by reference in their entirety), 4G11 (Tau⁵⁷64, as described in International Publication WO2016137950, the contents of which are herein incorporated by reference in their entirety), 1A6 (Tau⁷⁻¹⁷ and Tau²¹⁵⁻²²⁰, as described in International Publication WO2016137950), Tau15 or Tau81 (as described in International Publication WO2016055941, the contents of which are herein incorporated by reference in their entirety), TOC-1 (dimerized or aggregated tau, as described in International Publication WO2012149365, the contents of which are herein incorporated by reference in their entirety), pS404IgG2a/k (Neotope Biosciences, South San Francisco, CA; as described in Ittner et al., 2015. Neurochemistry 132:135-145, the contents of which are herein incorporated by reference in their entirety), TOMA (tau oligomer monoclonal antibody; as described in United States Patent Nos. U.S. Pat. Nos. 8,778,343 and 9,125,846, International Publications WO2012051498 and WO2011026031, or United States Publication Nos. US20150004169 and US20150322143, and Castillo-Carranza, D L et al., 2014 J Neurosci 34(12)4260-72, the contents of each of which are herein incorporated by reference in their entirety), TTC-99 (oligomeric tau), BMS-986168 (as described in United States Patent Publication US2014294831, International Publication WO2015081085 and United States Patent U.S. Pat. No. 8,980,271, the contents of which are herein incorporated by reference in their entirety), 3H3 (pan-amyloid epitope; described in Levites, Y et al 2015 J Neurosci 35(16)6265-76, the contents of which are herein incorporated by reference in their entirety), cis-pT231 (described in International Publications WO2012149334 and WO2011056561, the contents of which are herein incorporated by reference in their entirety), CP-3 (pSer²¹⁴; described in Jicha et al 1999 J Neurosci 19(17):7486-94, the contents of which are herein incorporated by reference in their entirety), TNT1 (Tau²⁻¹⁸; as described in United States Patent Publication 20160031978, the contents of which are herein incorporated by reference in their entirety), Tau-nY29 (nTyr²⁹; described in Reynolds M R, et al., 2006 J Neurosci 26(42):10636-45, the contents of which are herein incorporated by reference in their entirety), Tau-nY197 (nTyr¹⁹⁷; described in Reyes, J F et al., 2012 Acta Neuropathol 123(1):119-32, the contents of which are herein incorporated by reference in their entirety), Tau-nY394 (nTyr³⁹⁴; described in Reyes, J F et al 2012), 4E4 (Tau³³⁷⁻³⁴³ Tau³⁸⁷⁻³⁹⁷; described in International Publication WO2012049570 and United States Patent Publication US20150252102, the contents of each of which are herein incorporated by reference in their entirety), ADx210 (described in United States Patent Publication US20140161875, the contents of which are herein incorporated by reference in their entirety), ADx215 (described in United States Patent Publication US20140161875), ADx202 (as described in International Publication WO2015004163, the contents of which are herein incorporated by reference in their entirety), AP422 (pSer⁴²²; described in Hasegawa, M et al 1996 FEBS Lett 384:25-30, the contents of which are herein incorporated by reference in their entirety), Tau5 (Tau²¹⁰⁻²⁴¹), RTA2 (Tau²⁷³⁻²⁸³), RTAC (Tau⁴²⁶⁻⁴⁴¹), RTA1 (Tau²⁵⁷⁻²⁷⁴), T46 (Tau³⁹⁵⁻⁴³²), T49, MIGT4, O.BG.15, 525, 3-39, 4F1, MapTau (Tau⁹⁵⁻¹⁰⁸; SMI Covance), T1, HYB33801 (Tau⁵⁻¹²), Tau13 (Tau²⁻¹⁸), B11E8, 5J20 (14-3-3 tau), DC25 (Tau³⁴⁷⁻³⁵³), DC39N1 (Tau⁴⁵⁻⁷³), DC-11 (Tau³²¹⁻³⁹¹; described in United States Patent U.S. Pat. No. 7,746,180, the contents of which are herein incorporated by reference in their entirety), DC39 (Tau⁴⁰¹⁻⁴¹¹), DC4R, n847 (nitrated tau), SPM452, TI4, 1E1/A6 (Tau²⁷⁵⁻²⁹¹), 5E2, 8E6/C11 (Tau²⁰⁹⁻²²⁴), 2E12 (pT231), NFT200, 248E5 (Tau³⁻²¹⁴), IG2 (Thr¹⁷⁵, Thr¹⁸¹, Thr²³¹; as described in International Publication WO2016041553, the contents of which are herein incorporated by reference in their entirety), YP3 (as described in WO2007019273, the contents of which are herein incorporated by reference in their entirety), YP4 (as described in WO2007019273), 14-3-3 Tau (pSer 14-3-3 binding motif; Abcam, Cambridge, MA), E2814, semorinemab (RG6100, R07105705, MTAU9937A), gosuranemab (BIIB092, BMS-986168, IPN007/IPN002), tilavonemab (ABBV-8E12, C2N-8E12, HJ8.5), zagotenemab (LY3303560, MC-1 IgG1), posdinemab (JNJ-63733657, B296, PT3), bepranemab (UCB0107), BIIB076 (N1-105.6C5 huIgG1λ), RG7345 (RO6926496), UCB0107 (D IgG4), NPT088, PNT001, Lu AF87908, PRX005, and APNmAb005. Further, anti-tau antibodies may be any of those listed in the antibody section of Alzforum.org or at the Antibody Resource Page.com, the contents of each of which are herein incorporated by reference in their entirety. Further, anti-tau antibodies may be any commercially available anti-tau antibody. Additional antibodies may include any of those taught in Petry, F. R. et al., 2014. PLoS One 9(5): e94251, the contents of which are herein incorporated by reference in their entirety. In one example, such antibodies may include any of those described in Jicha, G. A. et al., 1997. Journal of Neuroscience Research 48:128-132, the contents of which are herein incorporated by reference in their entirety. One such antibody, MC-1 (or MC1), recognizes distinct conformations of tau that are associated with neurological disease. In some embodiments, anti-tau antibodies may be any of those described in Plotkin et al. (Neurobiology of Disease 2020; 144:105010).

[1501] In some embodiments, the AAV particles may have a payload region comprising any of the anti-tau antibodies as described in International Publication WO2017189963, the contents of which are herein incorporated by reference in their entirety. As a non-limiting example, the payload region may comprise one or more of the anti-tau antibodies as described in Table 3 of International Publication WO2017189963. In some embodiments, the payload region encodes one or more anti-tau antibodies selected from SEQ ID NO: 2948-4269 as described in WO2017189963.

[1502] In some embodiments, payloads may encode anti-tau antibodies (or fragments thereof) taught in United States Publication No. US2014294831, the contents of which are herein incorporated by reference in their entirety. Such antibodies may include IPN001 and/or IPN002 antibodies or fragments of such antibodies. In some cases, variable domains of IPN002 as presented in FIGS. 2A and 2B of US2014294831 may be used (e.g., incorporated into another antibody). In some cases, CDR regions of IPN002 as underlined in FIGS. 2A and 2B may be used (e.g., incorporated into another antibody or used to prepare humanized versions of IPN002). In some cases, anti-tau antibodies may include any of the IPN001 or IPN002 antibody variants taught in US2014294831 (e.g., in FIGS. 9-16 of that publication). In some embodiments, this antibody is also referred to as BMS-986168.

[1503] In some cases, payloads may encode anti-tau antibodies (or fragments thereof) taught in Otvos, L. et al., 1994. J Neurosci. Res 39(6):669-73, the contents of which are herein incorporated by reference in their entirety. Such antibodies may include monoclonal antibody PHF-1 or fragments thereof. The PHF-1 antibody binds to tau paired helical filaments, a pathological conformation of tau, found in certain neurological disorders, including Alzheimer's disease. Further, antibody affinity is increased when either serine 396 or serine 404 of tau is phosphorylated and even further increased when both are phosphorylated.

[1504] In some embodiments, payloads may encode anti-tau antibodies (or fragments thereof) taught in U.S. Pat. No. 5,811,310, the contents of which are herein incorporated by reference in their entirety. Such embodiments may include monoclonal antibodies PHF-1 or MC1 or fragments thereof. MC1 is a conformational antibody binding to the epitopes presented in Jicha, G. A., et al., 1997. J Neurosci Res 48(128-132).

[1505] In some embodiments, payloads may encode anti-tau antibodies (or fragments thereof) taught in International Publication Number WO2015035190, the contents of which are herein incorporated by reference in their entirety. Such embodiments may include, but are not limited to, antibodies PHF-1 or MC1 or fragments thereof. Viral genomes of the AAV particles of the present disclosure may comprise or encode any of SEQ ID NO: 1-6 of WO2015035190.

[1506] In some embodiments, viral genomes may encode anti-tau antibody MC1 scFv as described in Vitale et al 2018, (Acta Neuropath Commun. 6:82), the contents of which are herein incorporated by reference in their entirety.

[1507] In some embodiments, viral genomes may encode anti-tau antibody MC1 as described in International Publication WO2016137811, the contents of which are herein incorporated by reference in their entirety.

[1508] Anti-tau antibody molecules encoded by viral genomes may include antibodies that bind to one or more of the epitopes presented in Otvos, L. et al., 1994. J Neurosci. Res 39(6):669-73 (e.g., any of those presented in Table 1 of that publication).

[1509] In some embodiments, payloads may encode anti-tau antibody molecules taught in U.S. Pat. No. 7,746,180, the contents of which are herein incorporated by reference in their entirety. Such embodiments may include antibody DC-11 or fragments thereof.

[1510] In some embodiments, the antibody molecules encoded by the viral genomes of the present disclosure may target any of the antigenic regions or epitopes described in United States Patent Publication No US2008050383 or US20100316564, the contents of which are herein incorporated by reference in their entirety. In some embodiments, the antibody targets pS396/pS404. Such embodiments may include antibody 4E6 and/or variants or fragments thereof. The affinity of antibody 4E6 for soluble PHF and its ability to reduce soluble phospho tau has been described in Congdon, E. E. et al., 2016. Molecular Neurodegeneration Aug 30; 11(1):62, the contents of which are herein incorporated by reference in their entirety.

[1511] In some embodiments, the antibody molecules encoded by the viral genomes of the present disclosure may target any of the antigenic regions or epitopes described in International Patent Publication WO1998022120, the contents of which are herein incorporated by reference in their entirety. In some embodiments, the antibody may be PHF-6 (pT231), or fragments or variants thereof. In another embodiment, the antibody may be PHF-13 (pS396), or a fragment of variant thereof. These antibodies are further described in Hoffman et al., 1997. Biochemistry 36: 8114-8124, the contents of which are herein incorporated by reference in their entirety.

[1512] In some embodiments, the antibodies encoded by the viral genomes of the present disclosure may target any of the antigenic regions or epitopes described in International Publication WO2016126993, the contents of which are herein incorporated by reference in their entirety. The antibodies may be derived from any of the tau epitopes described in Table A of WO2016126993. In some embodiments, the antibody of the present disclosure may comprise any of the sequences listed in Table B or Table 1 of WO2016126993.

[1513] In some embodiments, the antibody molecules encoded by the viral genomes of the present disclosure may target any of the antigenic regions or epitopes described in United States Patent Publication US20120244174, the contents of which are herein incorporated by reference in their entirety. In some embodiments, the antibody may bind to caspase-cleaved tau. In some embodiments, the epitope for antibodies targeting caspase cleaved tau is aspartic acid 421. In another embodiment, the epitope for antibodies targeting caspase cleaved tau may be the C-terminus after glutamic residue Glu391. In yet another embodiment, the epitope for antibodies targeting caspase cleaved tau may be at the N-terminus at aspartic acid residue 13. In another embodiment, the antibody may be TauC3.

[1514] In some embodiments, the antibody molecules encoded by the viral genomes of the present disclosure may target any of the antigenic regions or epitopes described in United States Patent Publication US20160031978, the contents of which are herein incorporated by reference in their entirety. In some embodiments, the antibody may bind to tau N-terminal residues associated with the PP1/GSK3 signaling cascade. In some embodiments, the antibody may be TNT1.

[1515] In some embodiments, the antibody molecules encoded by the viral genomes of the present disclosure may be any of those described in d'Abramo, C et al., 2015. PLOS One 10(8):e0135774, the contents of which are herein incorporated by reference in their entirety. In some embodiments, the antibody may be CP13 (pS202), or a fragment or variant thereof. In another embodiment, the antibody may be RZ3 (pT231), or a fragment or variant thereof. In another embodiment, the antibody may be PG5 (pS409), or a fragment or variant thereof.

[1516] In some embodiments, the antibody molecules encoded by the viral genomes of the present disclosure may be any of those described in WO2018/106781, WO2015/200806, WO2014/165271, WO2017/191559, WO2014/028777, WO2015/197820, WO2019110571, WO2017/191561, WO2015/120364, WO2015/122922, WO2004/016655, WO2014/152157, WO2015/197823, WO2018/170351, WO2019/171258, WO2019/171259, WO2021/205359, WO2017/005732, WO2019/094595, WO2022/144406, WO2012/149365, WO2017/005734, U.S. Pat. No. 7,176,290, WO2013/041962, WO2016/079597, WO2020/097561, WO2020/180819, WO2015/197820, WO2018/178077, WO2019/077500, US2007/0280935, WO2010/142423, U.S. Pat. Nos. 8,609,097, 9,290,567, WO2015/091656, U.S. Pat. Nos. 9,562,091, 10,465,000, WO2015/114538, U.S. Pat. Nos. 10,087,245, 10,538,582, 11,124,563, WO2015/197735, U.S. Pat. No. 10,251,952, EP3164152B1, WO2016/207245, U.S. Pat. Nos. 9,862,763, 10,822,402, EP3313877B1, WO2012/045882, U.S. Pat. Nos. 9,304,138, 10,100,104, EP2625198, WO2013/050567, U.S. Pat. Nos. 9,540,434, 10,066,010, EP2764022B9, EP3135689B1, WO2013/151762, U.S. Pat. No. 9,657,091, EP2834270B1, WO2012/106363, U.S. Pat. No. 8,703,137, U.S. Ser. No. 10/894,822, EP2670434B1, WO2013/180238, EP2857039B1, EP3662931, US2015/0183854, WO2014/096321, WO2014/150877, U.S. Pat. No. 9,598,485, WO2017/009308, U.S. Ser. No. 10/196,439, U.S. Ser. No. 10/562,962, U.S. Ser. No. 10/934,348, US2021/0206843, EP3322442, WO2018/127519, U.S. Ser. No. 10/995,137, EP3565836, WO2017/191560, U.S. Ser. No. 10/899,638, US2021/0130449, EP3452508, WO2020/201828, U.S. Ser. No. 11/155,609, EP3946605A1, WO2021/262791, US2021/0403541, WO2018/154390, U.S. Ser. No. 10/556,950, U.S. Ser. No. 10/894,829, US2021/0380677, EP3585810, WO2016/196726, WO2014/100600, the contents of all of which are herein incorporated by reference in their entirety.

[1517] In some embodiments, the antibody molecules encoded by the viral genomes of the present disclosure bind to tau protein antigens. Tau protein antigens may include human microtubule-associated protein tau, isoform 2 (SEQ ID NO: 9200) or fragments thereof. Tau protein antigens may include ePHF or fragments thereof. Tau protein antigens may include one or more phosphorylated residues. Such phosphorylated residues may correspond to those found with pathological tau. In some embodiments tau protein antigens include any of those listed in Table 18. In the Table, phosphorylated residues associated with each antigen are denoted as (pS) for a phosphorylated serine and (pT) for phosphorylated threonine. In some embodiments, tau proteins may include variants (e.g., phosphorylated or unphosphorylated variants) or fragments of the sequences listed.

TABLE 18
Exemplary tau protein antigen sequences

| | | SEQ |
|---|---|---|
| | | ID |
| Antigen | Sequence | NO |
| human microtubule- | MAEPRQEFEVMEDHAGTYGLGDRKDQGGYTMHQDQEGDTDAGLKESPLQ | 9200 |
| associated | TPTEDGSEEPGSETSDAKSTPTAEDVTAPLVDEGAPGKQAAAQPHTEIP | |
| protein tau, | EGTTAEEAGIGDTPSLEDEAAGHVTQARMVSKSKDGIGSDDKKAKGADG | |
| isoform 2 | KTKIATPRGAAPPGQKGQANATRIPAKTPPAPKTPPSSGEPPKSGDRSG | |
| | YSSPGSPGTPGSRSRTPSLPTPPTREPKKVAVVRTPPKSPSSAKSRLQT | |
| | APVPMPDLKNVKSKIGSTENLKHQPGGGKVQIINKKLDLSNVQSKCGSK | |
| | DNIKHVPGGGSVQIVYKPVDLSKVTSKCGSLGNIHHKPGGGQVEVKSEK | |
| | LDFKDRVQSKIGSLDNITHVPGGGNKKIETHKLIFRENAKAKTDHGAEI | |
| | VYKSPVVSGDISPRHLSNVSSTGSIDMVDSPQLATLADEVSASLAKQGL | |
| PT3 epitope peptide | TPGSRSR(pT)PSLP(pT)PPTREPK | 2137 |
| (pT212/pT217) | | |
| Peptide 5 (tPeptide 5) | GTPGSRSR(pT)P(pS)LP(pT)PPTRE | 2138 |
| (pT212/pS214/pT217) | | |
| Peptide 12 | RENAKAKTDHGAEIVYK(pS)PVVSGDT(pS)PRHL(pS)NVSSTG | 2139 |
| (pS396/pS404/pS409) | | |
| Peptide 1 (AT120 | PTREPKKV | 2140 |
| epitope) | | |
| 6C5 epitope peptide | ARMVSKS | 2141 |
| UCB D & PT76 | SPSSAKSRLQTAPVPMPDLKNVKS | 2142 |
| epitope peptide | | |
| Tau(pS404) | DHGAEIVYKSPVVSGDT(pS)PRHLSNVSSTG | 2143 |
| AC04 peptide | CSR(pT)PSLP(pT)PPTREPK | 2144 |
| PepScan 193-210 | DR(pS)GY(pS)(pS)PG(pS)PG(pT)PG(pS)R(pS) | 2145 |
| peptide | | |
| Tau 191-214 phospho- | SGDRSGYS(pS)PGSPGTPGSRSRTPS | 2146 |
| peptide (pS199) | | |
| Tau191-214 phospho- | SGDRSGYSSPG(pS)PGTPGSRSRTPS | 2147 |
| peptide (pS202) | | |
| Tau191-214 phospho- | SGDRSGYSSPGSPG(pT)PGSRSRTPS | 2148 |
| peptide (pT205) | | |
| Tau191-214 phospho- | SGDRSGYS(pS)PG(pS)PG(pT)PGSRSRTPS | 2149 |
| peptide | | |
| (pS199/pS202/pT205) | | |
| Tau191-214 phospho- | SGDRSGYS(pS)PG(pS)PGTPGSRSRTPS | 2150 |
| peptide (pS199/pS202) | | |
| Tau 191-214 phospho- | SGDRSGYSSPG(pS)PG(pT)PGSRSRTPS | 2151 |
| peptide (pS202/pT205) | | |
| Tau191-214 phospho- | SGDRSGYS(pS)PGSPG(pT)PGSRSRTPS | 2152 |
| peptide (pS199/pT205) | | |
| Tau204-222 phospho- | GTPGSRSR(pT)PSLPTPPTRE | 2153 |
| peptide (pT212) | | |
| Tau204-222 phospho- | GTPGSRSRTP(pS)LPTPPTRE | 2154 |
| peptide (pS214) | | |
| Tau204-222 phospho- | GTPGSRSRTPSLP(pT)PPTRE | 2155 |
| peptide (pT217) | | |
| Tau204-222 phospho- | GTPGSRSR(pT)P(pS)LPTPPTRE | 2156 |
| peptide (pT212/pS214) | | |
| Tau204-222 phospho- | GTPGSRSR(pT)PSLP(pT)PPTRE | 2157 |
| peptide (pT212/pT217) | | |
| Tau204-222 phospho- | GTPGSRSRTP(pS)LP(pT)PPTRE | 2158 |
| peptide (pS214/pT217) | | |
| Tau204-222 phospho- | GTPGSRSR(pT)P(pS)LP(pT)PPTRE | 2159 |
| peptide | | |
| (pT212/pS214/pT217) | | |
| Tau217-234 phospho- | (pT)PP(pT)REPKKVAVVR(pT)PPK | 2160 |
| peptide | | |
| (pT217/pT220/pT231) | | |
| Tau225-240 phospho- | KVAVVR(pT)PPKSPSSAK | 2161 |
| peptide (pT231) | | |
| Tau phospho-peptide | KVAVVRTPPK(pS)PSSAKPS | 2162 |
| (pS235) | | |
| Tau phospho-peptide | KVAVVR(pT)PPK(pS)PSSAKPS | 2163 |
| (pT231/pS235) | | |

[1518] In some embodiments, the antibody molecules encoded by the viral genomes of the present disclosure bind to tau protein epitopes on tau protein antigens described herein. Such tau protein epitopes may include or be included within a tau protein antigen amino acid sequence listed in Table 18. In some embodiments, anti-tau antibodies of the present disclosure bind to tau protein epitopes that include a region formed by a complex of at least two tau proteins.

[1519] In some embodiments, the antibody molecules encoded by the viral genomes of the present disclosure exhibit binding that overlaps with a region of tau recognized by art-recognized antibodies, such as AT8 and PT3, but exhibit binding patterns to phosphorylated tau that differs from the art-recognized antibodies.

[1520] In some embodiments, the antibody molecules encoded by the viral genomes of the present disclosure binds to human tau, wherein the antibody binds to all or a portion of amino acid residues of tau selected from: (a) 183-212, (b) 187-218, (c) 33-82, 159-182, 197-226, and 229-246; (d) 217-242, (e) 35-76 and 187-218, (f) 5-34, (g) 187-218, (h) 33-82, 159-188, and 191-230, (i) 35-62, 107-124, and 203-220, (j) 35-82, 159-188, and 197-224, or (k) 53-78, 329-348, and 381-408, wherein human tau is numbered according to SEQ ID NO: 9200. In some embodiments, one or more of the serines, threonines, and/or tyrosines in the stretch of amino acids selected from (a)-(k) are phosphorylated. In some embodiments, all of the serines, threonines, and/or tyrosines in the stretch of amino acids selected from (a)-(k) are phosphorylated. In some embodiments, the antibody comprises the HCDR1, HCDR2, HCDR3, LCDR1, LCDR2, and LCDR3 sequences, or the VH and VL sequences, of an antibody listed in Table 14-16.

[1521] In some embodiments, the antibody molecules encoded by the viral genomes of the present disclosure bind to all or a portion of amino acids 195-215 of human tau (e.g., phosphorylated at all serines, threonines, and/or tyrosines present in this stretch of amino acids) with a dissociation constant (K_{D}) of about 1 pM to about 50 pM, or about 1-25 pM, e.g., as assessed by bio-layer interferometry.

[1522] In some embodiments, the antibody molecules encoded by the viral genomes of the present disclosure bind to all or a portion of amino acids 191-214 of human tau phosphorylated at S199 (e.g., phosphorylated only at S199 in this stretch of amino acids or throughout the entire tau protein), e.g., with a dissociation constant (K_{D}) of about 0.1 nM to about 10 nM, or about 0.5-5 nM, e.g., as assessed by bio-layer interferometry.

[1523] In some embodiments, the antibody molecules encoded by the viral genomes of the present disclosure bind to all or a portion of amino acids 217-234 of human tau phosphorylated at T217, T220, and T231 (e.g., phosphorylated only at T217, T220, and T231 in this stretch of amino acids or throughout the entire tau protein), e.g., with a dissociation constant (K_{D}) of about 0.1 nM to about 10 nM, or about 0.1-5 nM, e.g., as assessed by bio-layer interferometry.

[1524] In some embodiments, the antibody molecules encoded by the viral genomes of the present disclosure bind to all or a portion of amino acids 225-240 of tau phosphorylated at T231 (e.g., phosphorylated only at T231 in this stretch of amino acids or throughout the entire tau protein), e.g., with a dissociation constant (K_{D}) of about 0.1 nM to about 25 nM, or about 0.1-15 nM, e.g., as assessed by bio-layer interferometry.

[1525] In some embodiments, the antibody molecules encoded by the viral genomes of the present disclosure bind to human tau phosphorylated at amino acid residue 5404, or a peptide comprising or consisting of the amino acid sequence DHGAEIVYKSPVVSGDT(pS)PRHLSNVSSTG (SEQ ID NO: 2143), wherein p(S) corresponds to a phosphorylated serine residue. In some embodiments, the antibody comprises a heavy chain variable region (VH) comprising CDR1, CDR2, and CDR3 sequences comprising SEQ ID NOs: 2430, 2431, and 2432, respectively, and a light chain variable region (VL) comprising CDR1, CDR2, and CDR3 sequences comprising SEQ ID NOs: 2435, 2436, and 2437, respectively. In some embodiments, the antibody comprises VH and VL sequences comprising SEQ ID NOs: 2441 and 2442, respectively.

[1526] In some embodiments, the antibody molecules encoded by the viral genomes of the present disclosure bind to: (a) human tau phosphorylated at amino acid residue S199, but not at amino acid residues S202 and T205; (b) human tau phosphorylated at amino acid residue S202, but not at amino acid residues S199 and T205; (c) human tau phosphorylated at amino acid residue T205, but not at amino acid residues S199 and S202; (d) human tau phosphorylated at a combination of amino acid residues S199 and T205, but not at amino acid residue S202 (e.g., wherein binding tau phosphorylated at a combination of S199 and T205 is at least 3-times stronger (e.g., at least 4-time stronger) than background (e.g., non-specific) level of binding, e.g., binding by hIgG1 isotype control); (e) human tau phosphorylated at a combination of amino acid residues S202 and T205, but not at amino acid residue S199, but not human tau phosphorylated at a combination of residues S199 and S202, but not T205; (f) human tau phosphorylated at a combination of amino acid residues: (i) S202 and T205, but not S119, and (ii) S199 and T205, but not S202, e.g., at least 2 times (e.g., at least 3 times, at least 4 times, at least 5 times, 2-6 times, 2-5 times, 2-4 times, 2-3 times, 3-5 times or 4-5 times) more strongly than background (e.g., non-specific) level of binding, e.g., binding by hIgG1 isotype control); (g) human tau phosphorylated at a combination of amino acid residues: (i) 5199 and 5202, but not T205, (ii) 5202 and T205, but not S199, (iii) S199 and T205, but not 5202, and (iv) S199, S202, and T205 (e.g., wherein binding to phosphorylated tau is at least 1.6-times stronger (e.g., at least 1.7 times, at least 1.8 times, at least 1.9 times, at least 2 times, at least 3 times, 1.6-3 times, 1.6-2 times stronger) than background (e.g., non-specific) level of binding, e.g., binding by hIgG1 isotype control); (h) a peptide comprising or consisting of the amino acid sequence SGDRSGYS(pS)PGSPGTPGSRSRTPS (SEQ ID NO: 2146); (i) a peptide comprising or consisting of the amino acid sequence SGDRSGYSSPG(pS)PGTPGSRSRTPS (SEQ ID NO: 2147); (j) a peptide comprising or consisting of the amino acid sequence SGDRSGYSSPGSPG(pT)PGSRSRTPS (SEQ ID NO: 2148); (k) a peptide comprising or consisting of the amino acid sequence SGDRSGYS(pS)PGSPG(pT)PGSRSRTPS (SEQ ID NO: 2152) (e.g., wherein binding to the peptide is at least 3 times stronger (e.g., at least 4 times stronger) than background (e.g., non-specific) level of binding, e.g., binding by hIgG1 isotype control); (1) a peptide comprising or consisting of the amino acid sequence SGDRSGYSSPG(pS)PG(pT)PGSRSRTPS (SEQ ID NO: 2151), but not a peptide comprising or consisting of the amino acid sequence SGDRSGYS(pS)PG(pS)PGTPGSRSRTPS (SEQ ID NO: 2150); (m) peptides comprising or consisting of the amino acid sequences SGDRSGYSSPG(pS)PG(pT)PGSRSRTPS (SEQ ID NO: 2151) and SGDRSGYS(pS)PGSPG(pT)PGSRSRTPS (SEQ ID NO: 2152), e.g., wherein binding to the latter peptide is at least 2 times (e.g., at least 3 times, at least 4 times, at least 5 times, 2-6 times, 2-5 times, 2-4 times, 2-3 times, 3-5 times or 4-5 times) stronger than background (e.g., non-specific) level of binding, e.g., binding by hIgG1 isotype control); or (n) peptides comprising or consisting of the amino acid sequences SGDRSGYS(pS)PG(pS)PGTPGSRSRTPS (SEQ ID NO: 2150), SGDRSGYSSPG(pS)PG(pT)PGSRSRTPS (SEQ ID NO: 2151), SGDRSGYS(pS)PGSPG(pT)PGSRSRTPS (SEQ ID NO: 2152), and SGDRSGYS(pS)PG(pS)PG(pT)PGSRSRTPS (SEQ ID NO: 2149) (e.g., wherein binding to the peptides is at least 1.6 times stronger (e.g., at least 1.7 times, at least 1.8 times, at least 1.9 times, at least 2 times, at least 3 times, 1.6-4 times, 1.6-3 times stronger) than background (e.g., non-specific) level of binding, e.g., binding by hIgG1 isotype control); wherein p(S) and p(T) correspond to a phosphorylated serine and phosphorylated threonine, respectively, optionally wherein binding is assessed, e.g., using one point ELISA. In some embodiments, the antibody comprises (a) a heavy chain variable region (VH) comprising CDR1, CDR2, and CDR3 sequences comprising SEQ ID NOs: 2200, 2201, and 2202, respectively, and a light chain variable region (VL) comprising CDR1, CDR2, and CDR3 sequences comprising SEQ ID NOs: 2207, 2208, and 2209, respectively; (b) a heavy chain variable region (VH) comprising CDR1, CDR2, and CDR3 sequences comprising SEQ ID NOs: 2218, 2219, and 2220, respectively, and a light chain variable region (VL) comprising CDR1, CDR2, and CDR3 sequences comprising SEQ ID NOs: 2207, 2208, and 2224, respectively; (c) a heavy chain variable region (VH) comprising CDR1, CDR2, and CDR3 sequences comprising SEQ ID NOs: 2248, 2219, and 2249, respectively, and a light chain variable region (VL) comprising CDR1, CDR2, and CDR3 sequences comprising SEQ ID NOs: 2207, 2208, and 2224, respectively; (d) a heavy chain variable region (VH) comprising CDR1, CDR2, and CDR3 sequences comprising SEQ ID NOs: 2273, 2274, and 2275, respectively, and a light chain variable region (VL) comprising CDR1, CDR2, and CDR3 sequences comprising SEQ ID NOs: 2207, 2208, and 2277, respectively; (e) a heavy chain variable region (VH) comprising CDR1, CDR2, and CDR3 sequences comprising SEQ ID NOs: 2371, 2372, and 2373, respectively, and a light chain variable region (VL) comprising CDR1, CDR2, and CDR3 sequences comprising SEQ ID NOs: 2207, 2208, and 2224, respectively; (f) VH and VL sequences comprising SEQ ID NOs: 2214 and 2215, respectively; (g) VH and VL sequences comprising SEQ ID NOs: 2326 and 2327, respectively; (h) VH and VL sequences comprising SEQ ID NOs: 2253 and 2254, respectively; (i) VH and VL sequences comprising SEQ ID NOs: 2280 and 2281, respectively; or (j) VH and VL sequences comprising SEQ ID NOs: 2377 and 2378, respectively.

[1527] In some embodiments, the antibody molecules encoded by the viral genomes of the present disclosure bind to: (a) tau phosphorylated at T217, but not at T212 or T214, or (b) peptides comprising or consisting of the sequences GTPGSRSRTPSLP(pT)PPTRE (SEQ ID NO: 2155) and GTPGSRSRTP(pS)LP(pT)PPTRE (SEQ ID NO: 2158), but not peptides comprising or consisting of the sequences GTPGSRSR(pT)PSLPTPPTRE (SEQ ID NO: 2153), GTPGSRSRTP(pS)LPTPPTRE (SEQ ID NO: 2154), and GTPGSRSR(pT)P(pS)LPTPPTRE (SEQ ID NO: 2156), wherein p(S) and p(T) correspond to a phosphorylated serine and phosphorylated threonine, respectively, optionally wherein binding of the antibody to tau or the peptide is at least 1.5 times stronger (e.g., at least 1.6 times, at least 1.7 times, at least 1.8 times, at least 1.9 times, at least 2 times, at least 3 times, at least 4 times, at least 5 times, at least 6 times, 1.5-4 times, 1.5-3, 4-6 times stronger) than background (non-specific) level of binding, e.g., binding by hIgG1 isotype control), and optionally wherein binding of the antibody to tau or the peptide is assessed, e.g., using one point ELISA as described, e.g., in Example 8. In some embodiments, the antibody comprises: (a) a heavy chain variable region (VH) comprising CDR1, CDR2, and CDR3 sequences comprising SEQ ID NOs: 2232, 2233, and 2234, respectively, and a light chain variable region (VL) comprising CDR1, CDR2, and CDR3 sequences comprising SEQ ID NOs: 2238, 2239, and 2240, respectively; (b) a heavy chain variable region (VH) comprising CDR1, CDR2, and CDR3 sequences comprising SEQ ID NOs: 2284, 2392, and 2393, respectively, and a light chain variable region (VL) comprising CDR1, CDR2, and CDR3 sequences comprising SEQ ID NOs: 2404, 2405, and 2406, respectively; (c) a heavy chain variable region (VH) comprising CDR1, CDR2, and CDR3 sequences comprising SEQ ID NOs: 2445, 2446, and 2447, respectively, and a light chain variable region (VL) comprising CDR1, CDR2, and CDR3 sequences comprising SEQ ID NOs: 2452, 2421, and 2453, respectively; (d) VH and VL sequences comprising SEQ ID NOs: 2244 and 2245, respectively; (e) VH and VL sequences comprising SEQ ID NOs: 2411 and 2412, respectively; or (f) VH and VL sequences comprising SEQ ID NOs: 2455 and 2456, respectively.

[1528] Specific binding to the aforementioned recited phosphorylated residues or peptides can be determined by comparison with the background level of binding of the assay (e.g., one point ELISA) or level of binding by a negative control, such as an isotype control antibody (e.g., a human IgG1 isotype control antibody).

[1529] Anti-tau antibodies encoded by the viral genomes of the present disclosure may target tau in any antigenic form. As non-limiting examples, antigenic tau may be an unphosphorylated or unmodified tau protein, a phosphorylated or otherwise post-translationally modified tau protein (O-GlnAcylated, or nitrosylated), an oligomeric species of tau protein, a soluble species of tau protein, an insoluble species of tau protein, a conformationally abnormal species of tau protein, a neuropathological form of tau protein and/or a neurofibrillary tangle or a precursor thereof.

[1530] Anti-tau antibody molecules encoded by the viral genomes, may target any antigenic region or epitope along the full length of any of the six human tau protein isoforms, such as, but not limited to, tau441 (NP_005901.2; MAEPRQEFEVMEDHAGTYGLGDRKDQGGYTMHQDQEGDTDAGLKESPLQTPTEDGSEEPGSET SDAKSTPTAEDVTAPLVDEGAPGKQAAAQPHTEIPEGTTAEEAGIGDTPSLEDEAAGHVTQARM VSKSKDGTGSDDKKAKGADGKTKIATPRGAAPPGQKGQANATRIPAKTPPAPKTPPSSGEPPKSG DRSGYSSPGSPGTPGSRSRTPSLPTPPTREPKKVAVVRTPPKSPSSAKSRLQTAPVPMPDLKNVKS KIGSTENLKHQPGGGKVQIINKKLDLSNVQSKCGSKDNIKHVPGGGSVQIVYKPVDLSKVTSKCG SLGNIHHKPGGGQVEVKSEKLDFKDRVQSKIGSLDNITHVPGGGNKKIETHKLTFRENAKAKTD HGAEIVYKSPVVSGDTSPRHLSNVSSTGSIDMVDSPQLATLADEVSASLAKQGL; SEQ ID NO: 2127). As non-limiting examples, the targeted antigenic peptides of the tau protein may be any of the following phosphorylated sites pT50, pS396, pS396-pS404, pS404, pS396-pS404-pS422, pS409, pS413, pS422, pS198, pS199, pS199-pS202, pS202, pT205, pT212, pS214, pT212-pS214, pT181, pT231, cis-pT231, pT231-pS235, pS235, pS238, pT245, pS262, pY310, pY394, pS324, pS356, pTau¹⁷⁷⁻¹⁸⁷, pS396-pS404, pY18, pS610, pS622, nitrosylated tau (nY18, nY29), methylated tau (di-meK281, dimeK311), 0-GlnAcylated tau at S400, any of the following acetylated sites acK174, acK274, acK280, acK281 and/or any combination thereof. Acetylated tau proteins and associated antigenic peptides are described in Min et al., 2010, Neuron., 67, 953-966, Min et al., 2015, Nature Medicine., 10, 1154-1162, Cohen et al., 2011, Nature Communications., 2, 252, Gorsky et al., 2016, Scientific Report., 6, 22685, Tracy et al., 2016, Neuron., 90, 245-260, the contents of each of which are herein incorporated by reference in their entirety. Phosphorylated tau proteins and associated antigenic peptides are described in Asuni et al., 2007, J Neurosci., 27, 9115-9129, Boutajangout et al., 2010, J Neurosci., 30, 16559-16566, Boutajangout et al., 2011, J Neurochem., 118, 658-667, Chai et al., 2011, J Biol Chem., 286, 34457-34467, Gu et al., 2011, J Biol Chem., 288, 33081-33095, Sankaranarayanan et al., 2015, PLoS One, 10, e0125614, Ittner et al., 2015, J Neurochem., 132, 135-145, D'Abramo et al., 2016, Neurobiol Aging., 37, 58-65, Collin et al., 2014, Brain., 137, 2834-2846, Kondo et al., 2015, Nature., 523, 431-436, the contents of each of which are herein incorporated by reference in their entirety.

[1531] In some embodiments, the targeted antigenic peptides of the tau protein may comprise a sequence selected from SPGTPGSRSRpTPSLPTPP (SEQ ID NO: 2128), SRTPSLPpTPPTREPK (SEQ ID NO: 2129), KKVAVVRpTPPKSPSS (SEQ ID NO: 2130), TPGSRSRpTPSLPpTPPTREPK (SEQ ID NO: 2131), SRTPSLPpTPPTREPKKVAVVRpTPPKSPSS (SEQ ID NO: 2132), TPGSRSRpTPSLPpTPPTREPKKVAVVRpTPPKSPSS (SEQ ID NO: 2133), TPGSRSRTPSLPTPPTREPKKVAVVRTPPKSPSS (SEQ ID NO: 2134), TPGSRSRpTPSLPTPPTREPKKVAVVRpTPPKSPSS (SEQ ID NO: 2135), and TPPSSGEPPKSGDRSGYSSPGSPGTPGSRSRTPSLPTPPTREPKKVAVV (SEQ ID NO: 2136).

[1532] In some embodiments, the antibody molecule encoded by the viral genomes of the present disclosure may be a pS409 targeting antibody as described in Lee et al., 2016, Cell Reports, 16, 1690-1700, or International Patent Publication WO2013151762, the contents of each of which are herein incorporated by reference in their entirety. In some embodiments, this antibody may be RG6100 or R071057 or variants or fragments thereof.

[1533] In some embodiments, the antibody molecule encoded by the viral genomes of the present disclosure may be a pS413 targeting antibody as described in Umeda et al., 2015, Ann Clin Trans Neurol., 2(3), 241-255 or International Patent Publication WO2013180238, the contents of each of which are herein incorporated by reference in their entirety. In some embodiments, the antibody is Ta1505 or variants or fragments thereof.

[1534] In some embodiments, the antibody molecule encoded by the viral genomes of the present disclosure may target a tau epitope with amino acid residues 210-275, more specifically pS238 and/or pT245, as described in International Publication WO2011053565, the contents of which are herein incorporated by reference in their entirety.

[1535] In some embodiments, the CDRs of an antibody molecule encoded by the viral genomes of the present disclosure may be any of those listed in or incorporated in the antibody sequences of Table 7-16. In some embodiments, the CDRs may be any of those described in International Publication WO2015122922, the contents of which are herein incorporated by reference in their entirety. In some embodiments, a CDR may be any of those chosen from the group of SEQ ID NO: 41, 49, or 57 of WO2015122922. Further a CDR of an antibody encoded by the viral genomes of the present disclosure may have 50%, 60%, 70%, 80%, 90%, or 95% identity to SEQ ID NO: 41, 49, or 57 of WO2015122922.

[1536] In some embodiments, the antibody molecules encoded by the viral genomes of the present disclosure may be any of those described in International Publication WO2016097315, the contents of which are herein incorporated by reference in their entirety. In some embodiments, the antibody may have an amino acid sequence as shown by SEQ ID NO: 2, 11, 20, 29, 38, 47, 56, 65, 74, 83, 92, 101, 110, 119, 128, 137, 146, 155, 164, 173, 182, 191, 209, 218, 226, or 227 of WO2016097315.

[1537] In some embodiments, the antibody molecules encoded by the viral genomes of the present disclosure may be a multispecific blood brain barrier receptor antibody that also targets tau, as described in International Publication WO2016094566, the contents of which are herein incorporated by reference in their entirety. In some embodiments, the antibody may have a sequence as shown by SEQ ID NO: 1, 2, 17, 18, 33, 34, 49, 50, 65, 66, 81, 82, 9-16, 25-32, 41-48, 57-64, 73-80, 89-96 of WO2016094566.

[1538] In some embodiments, the antibody molecules encoded by the viral genomes of the present disclosure may be any of those taught in United States Patent Nos. U.S. Pat. Nos. 8,778,343 and 9,125,846, International Publications WO2012051498 and WO2011026031, or United States Publication Nos. US20150004169 and US20150322143, the contents of each of which are herein incorporated by reference in their entirety. Such antibodies may include those that bind to oligomeric species of tau. Further, such an antibody may be referred to as TOMA (tau oligomer monoclonal antibody), as described in Castillo-Carranza et at (Castillo-Carranza, D L et al., 2014 J Neurosci 34(12)4260-72) the contents of which are herein incorporated by reference in their entirety. In some embodiments, the antibody that binds oligomeric tau may be TTC-99.

[1539] In some embodiments, the antibody molecules encoded by the viral genomes of the present disclosure may be any of those taught in International Publications WO2014059442, the contents of which are herein incorporated by reference in their entirety. Such antibodies may include those that bind to oligomeric species of tau.

[1540] In some embodiments, the antibody molecules encoded by the viral genomes of the present disclosure may be any of those taught in the International Publications WO2014008404 and WO2016126993, United States Patent Publication US20150183855, Yanamandra, K et al., 2013 Neuron 80(2):402-14 and Yanamandra, K et al 2015 Ann Clin Transl Neurol 2(3):278-88, the contents of each of which are herein incorporated by reference in their entirety. Such antibodies may block tau seeding. Non-limiting examples of antibodies described in these publications include HJ8.1.1, HJ8.1.2, HJ8.2, HJ8.3, HJ8.4, HJ8.5, HJ8.7, HJ8.8, HJ9.1, HJ9.2, HJ9.3, HJ9.4, HJ9.5, and variants thereof. Non-limiting examples of targeted epitopes of tau may include amino acids 22-34, 385-391, 405-411, 3-6, 118-122, 386-401, 7-13, and/or 272-281 of human tau.

[1541] In some embodiments, the antibody molecules encoded by the viral genomes of the present disclosure may be any of those taught in the International Publications WO2002062851, the contents of which are herein incorporated by reference in their entirety.

[1542] In some embodiments, the antibody molecules encoded by the viral genomes of the present disclosure may be as described in Bright, J et al., 2015 Neurobiol of Aging 36:693-709; Pedersen, JT and Sigurdsson E M, 2015 Trends Mol Med 21(6):394-402; Levites, Y et al 2015 J Neurosci 35(16)6265-76; Jicha et al 1999 J Neurosci 19(17):7486-94; Reyes J F et al., 2012 Acta Neuropathol 123(1):119-32; Reynolds M R, et al., 2006 J Neurosci 26(42):10636-45; Gamblin, T C et al 2003 PNAS 100(17):10032-7; Castillo-Carranza, D L et al., 2014 J Neurosci 34(12)4260-72; Walls, K C et al., 2014 Neurosci Lett 575:96-100; Yanamandra, K et al., 2013 Neuron 80(2):402-14; Yanamandra, K et al 2015 Ann Clin Transl Neurol 2(3):278-88; Allen B, et al., 2002 J Neurosci 22(21):9340-51; Gotz, J et al., 2010 Biochem Biophys Acta 1802(10):860-71; Hasegawa, M et al 1996 FEBS Lett 384:25-30; Carmel, G et al 1996 J Biol Chem 271(51):32780-32795; Jicha, G A et al, 1997 J Neurosci Res 48(2):128-132; Jicha, G A et al., 1997 J Neurochem 69(5):2087-95; the contents of each of which are herein incorporated by reference in their entirety.

[1543] Anti-tau antibody molecules encoded by the viral genomes of the present disclosure may be any commercially available anti-tau antibody known in the art or developed by a person with skill in the art. Non-limiting examples of commercially available anti-tau antibodies include EPR2396(2) (pThr⁵⁰; Abcam, Cambridge, MA), 5H911 (pThr¹⁸¹; ThermoFisher, Waltham, MA), M7004D06 (pThr¹⁸¹; BioLegend, San Diego, CA), 1E7 (pThr¹⁸¹; EMD Millipore, Billerica, MA), EPR2400 (pSer¹⁹⁸; Abcam, Cambridge, MA), EPR2401Y (pSer¹⁹⁹; Abcam, Cambridge, MA), 2H23L4 (pSer¹⁹⁹; ThermoFisher, Waltham, MA), EPR2402 (pSer²¹²; Abcam, Cambridge, MA), 10F8 (pSer²¹²; Abcam, Cambridge, MA), EPR2403(2) (pThr²⁰⁵; Abcam, Cambridge, MA), EPR1884(2) (pSer²¹⁴; Abcam, Cambridge, MA), EPR2488 (pThr²³¹; Abcam, Cambridge, MA), 1H6L6 (pThr²³¹; ThermoFisher, Waltham, MA), 3G3 (pThr²³¹, pSer²³⁵; Abcam, Cambridge, MA), EPR2452 (pSer²³⁵; Abcam, Cambridge, MA), 12G10 (pSer²³⁸; Abcam, Cambridge, MA), EPR2454 (pSer²⁶²; Abcam, Cambridge, MA), EPR2457(2) (pSer³²⁴; Abcam, Cambridge, MA), EPR2603 (pSer³⁵⁶; Abcam, Cambridge, MA), EPR2731 (pSer³⁹⁶; Abcam, Cambridge, MA), EPR2605 (pSer⁴⁰⁴; Abcam, Cambridge, MA), EPR2866 (pSer⁴²²; Abcam, Cambridge, MA), 1A4 (pTau¹⁷⁷⁻¹⁸⁷; Origene, Rockville, MD), 7G9 (pTau¹⁷⁷⁻¹⁸⁷; Origene, Rockville, MD), 9B4 (pTau¹⁷⁷⁻¹⁸⁷; Origene, Rockville, MD), 2A4 (pTau¹⁷⁷⁻¹⁸⁷; Origene, Rockville, MD), 9G3 (pTyr¹⁸; NovusBio, Littleton, CO), EPR2455(2) (pSer⁶¹⁰; Abcam, Cambridge, MA), EP2456Y (pSer⁶²²; Abcam, Cambridge, MA; EMD Millipore, Billerica, MA), SMI 51 (PHF Tau⁹⁵⁻¹⁰⁸; BioLegend, San Diego, CA), TOMA-1 (Oligomeric Tau; EMD Millipore, Billerica, MA), Tau-nY18 (nTyr¹⁸; Origene, Rockville, MD; BioLegend, San Diego, CA; EMD Millipore, Billerica, MA), Tau-nY29 (nTyr²⁹; BioLegend, San Diego, CA; EMD Millipore, Billerica, MA; Abcam, Cambridge, MA), 1C9.G6 (di-methyl-Lys²⁸¹; BioLegend, San Diego, CA), 7G5.F4 (di-methyl-Lys³¹¹; BioLegend, San Diego, CA), TNT-1 (Tau²¹⁸; EMD Millipore, Billerica, MA), TNT-2 (Tau²⁻¹⁸; EMD Millipore, Billerica, MA), 7B8 (Tau⁵⁻¹²; Abcam, Cambridge, MA), Tau-13 (Tau²⁰⁻³⁵; BioLegend, San Diego, CA), 1-100 (Tau¹⁻¹⁰⁰; BioLegend, San Diego, CA), 2G9.F10 (Tau¹⁵⁷⁻¹⁶⁸; BioLegend, San Diego, CA; Origene, Rockville, MD), 39E10 (Tau¹⁸⁹⁻¹⁹⁵; BioLegend, San Diego, CA; Origene, Rockville, MD), 77E9 (Tau¹¹⁵⁻¹⁹⁵; BioLegend, San Diego, CA; Origene, Rockville, MD), AT8 (pSer²⁰², pThr²⁰⁵; ThermoFisher, Waltham, MA), AT100 (pThr²¹², pSer²¹⁴; ThermoFisher, Waltham, MA), PHF-6 (pThr²³¹; NovusBio, Littleton, CO; EMD Millipore, Billerica, MA; BioLegend, San Diego, CA; ThermoFisher, Waltham, MA), AT180 (pThr²³¹; ThermoFisher, Waltham, MA), AT270 (pThr¹⁸¹; ThermoFisher, Waltham, MA), PHF-13 (pSer³⁹⁶; ThermoFisher, Waltham, MA; BioLegend, San Diego, CA), TauC3 (Asp⁴²¹; BioLegend, San Diego, CA; EMD Millipore, Billerica, MA; ThermoFisher, Waltham, MA), Tau12 (Tau⁶⁻¹⁸; BioLegend, San Diego, CA; EMD Millipore, Billerica, MA), Tau5 (Tau²¹⁰⁻²⁴¹; BioLegend, San Diego, CA; EMD Millipore, Billerica, MA; Abcam, Cambridge MA; ThermoFisher, Waltham, MA), HT7 (Tau¹⁵⁹⁻¹⁶³; ThermoFisher, Waltham, MA), 77G7 (Tau³¹⁶⁻³⁵⁵; BioLegend, San Diego, CA), Tau46 (Tau⁴⁰⁴⁻⁴⁴¹; BioLegend, San Diego, CA; NovusBio, Littleton, CO; Abcam, Cambridge, MA), UMAB239 (Tau⁶²³⁻⁷⁵⁸; Origene, Rockville, MD), OTI6G3 (Tau⁶²³⁻⁷⁵⁸; Origene, Rockville, MD), OTI13E11 (Tau⁶²³⁻⁷⁵⁸; Origene, Rockville, MD), OTI113B5 (Tau⁶²³⁻⁷⁵⁸; Origene, Rockville, MD), E178 (Tau⁷⁰⁰⁻⁸⁰⁰; Abcam, Cambridge, MA), SP70 (N-terminal Tau; Origene, Rockville, MD; NovusBio, Littleton, CO; ThermoFisher, Waltham, MA; Abcam, Cambridge, MA), C45 (N-terminal Tau; Origene, Rockville, MD), Tau7 (C-terminal Tau; EMD Millipore, Billerica, MA), S.125.0 (C-terminal Tau; ThermoFisher, Waltham, MA), 8E6/C11 (Three-repeat Tau²⁰⁹⁻²²⁴; EMD Millipore, Billerica, MA), 1E1/A6 (Four-repeat Tau²⁷⁵⁻²⁹¹; EMD Millipore, Billerica, MA), 7D12.1 (Four-repeat Tau²⁷⁵⁻²⁹¹; EMD Millipore, Billerica, MA), 5C7 (Four-repeat Tau²⁶⁷⁻²⁷⁸; BioLegend, San Diego, CA; Origene, Rockville, MD), 5F9 (Four-repeat Tau²⁷⁵⁻²⁹¹; BioLegend, San Diego, CA; Origene, Rockville, MD), 3H6.H7 (0N Tau³⁹⁻⁵⁰; BioLegend, San Diego, CA; Origene, Rockville, MD), 4H5.B9 (1N Tau⁶⁸⁻⁷⁹; BioLegend, San Diego, CA; Origene, Rockville, MD), 71C11 (2N Tau; BioLegend, San Diego, CA), PC1C6 (unphosphorylated tau; EMD Millipore, Billerica, MA), Tau2 (BioLegend, San Diego, CA; Origene, Rockville, MD; EMD Millipore, Billerica, MA), 2E9 (Origene, Rockville, MD; NovusBio, Littleton, CO), 4F1 (Origene, Rockville, MD; NovusBio, Littleton, CO), 5B10 (NovusBio, Littleton, CO); 5E2 (EMD Millipore, Billerica, MA), Tau-93 (Origene, Rockville, MD), T14 (ThermoFisher, Waltham, MA), T46 (ThermoFisher, Waltham, MA), BT2 (ThermoFisher, Waltham, MA) and/or variants or derivates thereof.

[1544] In some embodiments, the antibody molecule encoded by the viral genomes of the present disclosure may be multispecific antibodies for transferrin receptor and a brain antigen, wherein the brain antigen may be tau, as described in International Publication WO2016081643, the contents of which are herein incorporated by reference in their entirety. In some embodiments, the antibody may have a sequence as given by SEQ ID NO: 160 or 161 of WO2016081643.

[1545] In some embodiments, the antibody molecules encoded by the viral genomes of the present disclosure are any of those described in United States Patent Nos. U.S. Pat. Nos. 8,871,447, 8,420,613, International Publication No. WO2014193935, WO2010011999, or in United States Publication Nos. US20110250217, US20110020237, US20100316590, or US20120225864, the contents of each of which are herein incorporated by reference in their entirety. In some embodiments, the antibody molecule recognizes a misfolded, amyloidogenic or aggregating protein.

[1546] In some embodiments, the antibody molecules encoded by the viral genomes of the present disclosure bind to tau protein epitopes that are recognized by the anti-tau antibody molecules described herein. In some embodiments, anti-tau antibody molecules bind to tau protein epitopes that include a region formed by a complex of at least two tau proteins.

[1547] In some embodiments, the antibody molecules encoded by the viral genomes of the present disclosure competes for binding to tau with the aforesaid anti-tau antibody molecules. In some embodiments, the anti-tau antibody molecules encoded by the viral genomes of the present disclosure bind to the same epitope as (e.g., phospho-epitope), substantially the same epitope as, an epitope that overlaps with, or an epitope that substantially overlaps with, the epitope recognized by the aforesaid anti-tau antibody molecules.

[1548] In some embodiments, compete or cross-compete refers to the ability of an antibody molecule to interfere with binding of an anti-tau antibody molecule, e.g., an anti-tau antibody molecule described herein, to a target, e.g., tau protein. The interference with binding can be direct or indirect (e.g., through an allosteric modulation of the antibody molecule or the target). The extent to which an antibody molecule is able to interfere with the binding of another antibody molecule to the target, and therefore whether it can be said to compete, can be determined using a competition binding assay, for example, a FACS assay, an ELISA or BIACORE assay. In some embodiments, a competition binding assay is a quantitative competition assay. In some embodiments, a first anti-tau antibody molecule is said to compete for binding to the target with a second anti-tau antibody molecule when the binding of the first antibody molecule to the target is reduced by 10% or more, e.g., 20% or more, 30% or more, 40% or more, 50% or more, 55% or more, 60% or more, 65% or more, 70% or more, 75% or more, 80% or more, 85% or more, 90% or more, 95% or more, 98% or more, 99% or more in a competition binding assay.

[1549] In some embodiments, an epitope comprises the moieties of an antigen (e.g., a tau protein antigen) that specifically interact with an antibody molecule. Such moieties, referred to herein as epitopic determinants, typically comprise, or are part of, elements such as amino acid side chains or sugar side chains. An epitopic determinate can be defined by methods known in the art or disclosed herein, e.g., by crystallography or by hydrogen-deuterium exchange. At least one or some of the moieties on the antibody, that specifically interact with an epitopic determinant, are typically located in a CDR(s). Typically, an epitope has a specific three dimensional structural characteristics. Typically, an epitope has specific charge characteristics. Some epitopes are linear epitopes while others are conformational epitopes.

[1550] In an embodiment, an epitopic determinant is a moiety on the antigen, e.g., such as amino acid side chain or sugar side chain, or part thereof, which, when the antigen and antibody molecule are co-crystallized, is within a predetermined distance, e.g., within 5 Angstroms, of a moiety on the antibody molecule, referred to herein as a crystallographic epitopic determinant. In some embodiments, the crystallographic epitopic determinants of an epitope are collectively referred to as a crystallographic epitope.

[1551] A first antibody molecule binds the same epitope as a second antibody (e.g., a reference antibody molecule, e.g., an antibody molecule disclosed herein) if the first antibody molecule specifically interacts with the same epitopic determinants on the antigen as does the second or reference antibody molecule, e.g., when interaction is measured in the same way for both the antibody molecule and the second or reference antibody molecule. Epitopes that overlap share at least one epitopic determinant. A first antibody molecule binds an overlapping epitope with a second antibody molecule (e.g., a reference antibody molecule, e.g., an antibody molecule disclosed herein) when both antibody molecules specifically interact with a common epitopic determinant. A first and a second antibody molecule (e.g., a reference antibody molecule, e.g., an antibody molecule disclosed herein) bind substantially overlapping epitopes if at least half of the epitopic determinants of the second or reference antibody molecule are found as epitopic determinants in the epitope of the first antibody molecule. A first and a second antibody molecule (e.g., a reference antibody molecule, e.g., an antibody molecule disclosed herein) bind substantially the same epitope if the first antibody molecule binds at least half of the core epitopic determinants of the epitope of the second or reference antibody molecule, wherein the core epitopic determinants are defined by crystallography.

### Payload Component: SH3-Derived Binding Polypeptide

[1552] In some embodiments, the nucleic acid encoding the payload, e.g., antibody molecule, comprises a nucleotide sequence encoding a Fyn SH3-derived binding polypeptide (e.g., a Fynomer sequence or Fynomer sequence region herein). Fynomers are small 7-kDa globular proteins derived from the SH3 domain of the human Fyn kinase (Fyn SH3) that can be engineered to bind with antibody-like affinity and specificity to a target of choice through mutation of two loops (RT- and src-loop) on the surface of the Fyn SH3 domain (Brack et al. (2014), Mol Cancer Ther 13(8):2030-2039). Fynomers may be used to generate multispecific FynomAbs, which are obtained by fusion of Fynomers to any of the four antibody light- or heavy-chain termini. Id.

### Payload Component: Linker

[1553] In some embodiments, a viral genome described herein may be engineered with one or more spacer or linker regions to separate coding or non-coding regions.

[1554] In some embodiments, the payload region of the AAV particle may optionally encode one or more linker sequences. In some cases, the linker may be a peptide linker that may be used to connect the polypeptides encoded by the payload region (i.e., light and heavy antibody chains during expression). Some peptide linkers may be cleaved after expression to separate heavy and light chain domains, allowing assembly of mature antibodies or antibody fragments. Linker cleavage may be enzymatic. In some cases, linkers comprise an enzymatic cleavage site to facilitate intracellular or extracellular cleavage. Some payload regions encode linkers that interrupt polypeptide synthesis during translation of the linker sequence from an mRNA transcript. Such linkers may facilitate the translation of separate protein domains (e.g., heavy and light chain antibody domains) from a single transcript. In some cases, two or more linkers are encoded by a payload region of the viral genome. Non-limiting examples of linkers that may be encoded by the payload region of an AAV particle viral genome are given in Table 19. In some embodiments, the encoded linker comprises an amino acid sequence or nucleic acid sequence encoded by any one of the nucleotide sequences provided in Table 19, or an amino acid sequence or nucleic acid sequence with at least 70%, 75%, 80%, 85%, 90%, 95%, or 99% sequence identity thereto.

TABLE 19
Linkers

| | | | e | |
|---|---|---|---|---|
| Linker | | | ID | |
| ID | Description | Length | NO | Sequence |
| Linker1 | Furin | 12 | 3702 | agaaagaggcga |
| Linker2 | Furin | 12 | 3703 | cgggccaagcgg |
| Linker3 | T2A | 54 | 3704 | gagggcagaggaagtcttctaacatgcggtgacgtggagga |
| | | | | gaatcccggccct |
| Linker4 | F2A | 75 | 3705 | ggaagcggagtgaaacagactttgaattttgaccttctcaa |
| | | | | gttggcgggagacgtggagtccaaccctggacct |
| Linker5 | P2A | 66 | 3706 | ggaagcggagctactaacttcagcctgctgaagcaggctgg |
| | | | | agacgtggaggagaaccctggacct |
| Linker6 | G4S | 18 | 3707 | tccggaggcggcggcagc |
| Linker7 | G4S3 | 45 | 3708 | ggtggtggtggtagcggcggcggcggctctggtggtggtgg |
| | | | | atcc |
| Linker8 | G4S5 | 75 | 3709 | ggcggaggtggctccggaggcggaggcagcggcggaggtgg |
| | | | | gtctggcggaggcgggtgcggcggaggtggctcc |
| Linker9 | IRES | 609 | 3710 | aattccgcccctctcccccccccccctctccctcccccccc |
| | | | | cctaacgttactggccgaagccgcttggaataaggccggtg |
| | | | | tgcgtttgtctatatgttattttccaccatattgccgtctt |
| | | | | ttggcaatgtgagggcccggaaacctggccctgtcttcttg |
| | | | | acgagcattcctaggggtctttcccctctcgccaaaggaat |
| | | | | gcaaggtctgttgaatgtcgtgaaggaagcagttcctctgg |
| | | | | aagcttcttgaagacaaacaacgtctgtagcgaccctttgc |
| | | | | aggcagcggaaccccccacctggcgacaggtgcctctgcgg |
| | | | | ccaaaagccacgtgtataagatacacctgcaaaggcggcac |
| | | | | aaccccagtgccacgttgtgagttggatagttgtggaaaga |
| | | | | gtcaaatggctctcctcaagcgtattcaacaaggggctgaa |
| | | | | ggatgcccagaaggtaccccattgtatgggatctgatctgg |
| | | | | ggcctcggtgcacatgctttacatgtgtttagtcgaggtta |
| | | | | aaaaaacgtctaggccccccgaaccacggggacgtggtttt |
| | | | | cctttgaaaaacacgatgataatatggccacaacc |
| Linker10 | IRES-2 | 623 | 3711 | taacgaattccgcccctctcccccccccccctctccctccc |
| | | | | ccccccctaacgttactggccgaagccgcttggaataaggc |
| | | | | cggtgtgcgtttgtctatatgttattttccaccatattgcc |
| | | | | gtcttttggcaatgtgagggcccggaaacctggccctgtct |
| | | | | tcttgacgagcattcctaggggtctttcccctctcgccaaa |
| | | | | ggaatgcaaggtctgttgaatgtcgtgaaggaagcagttcc |
| | | | | tctggaagcttcttgaagacaaacaacgtctgtagcgaccc |
| | | | | tttgcaggcagcggaacccccacctggcgacaggtgcctc |
| | | | | tgcggccaaaagccacgtgtataagatacacctgcaaaggc |
| | | | | ggcacaaccccagtgccacgttgtgagttggatagttgtgg |
| | | | | aaagagtcaaatggctctcctcaagcgtattcaacaagggg |
| | | | | ctgaaggatgcccagaaggtaccccattgtatgggatctga |
| | | | | tctggggcctcggtgcacatgctttacatgtgtttagtcga |
| | | | | ggttaaaaaaacgtctaggccccccgaaccacggggacgtg |
| | | | | gttttcctttgaaaaacacgatgataatatggccacaaccg |
| | | | | ccgccacc |
| Linker11 | hIgG2 hinge | 54 | 3712 | gtggagaggaagtgctgcgtggagtgcccaccatgccctgc |
| | | | | ccctcctgtggcc |
| Linker12 | hIgG3 hinge | 108 | 3713 | gagctcaaaaccccacttggtgacacaactcacacatgccc |
| | | | | acggtgcccagagcccaaatcttgtgacacacctcccccgt |
| | | | | gcccacggtgcccagcacctgaactc |
| Linker13 | hIgG3-2 hinge | 153 | 3714 | gagctcaaaaccccacttggtgacacaactcacacatgccc |
| | | | | acggtgcccagagcccaaatcttgtgacacacctcccccgt |
| | | | | gcccacggtgcccagagcccaaatcttgtgacacacctccc |
| | | | | ccatgcccacggtgcccagcacctgaactc |
| Linker14 | hIgG3-3 hinge | 198 | 3715 | gagctcaaaaccccacttggtgacacaactcacacatgccc |
| | | | | acggtgcccagagcccaaatcttgtgacacacctcccccgt |
| | | | | gcccacggtgcccagagcccaaatcttgtgacacacctccc |
| | | | | ccatgcccacggtgcccagagcccaaatcttgtgacacacc |
| | | | | tcccccgtgcccaaggtgcccagcacctgaactc |
| Linker15 | msiGG-1 | 45 | 3716 | gtgcccagggattgtggttgtaagccttgcatatgtacagt |
| | hinge | | | ccca |
| Linker16 | msiGG1 hinge | 18 | 3717 | gtgcccagggattgtggt |
| Linker17 | HigG3 hinge | 198 | 3718 | gagctcaaaaccccacttggtgacacaactcacacatgccc |
| | | | | acggtgcccagagcccaaatcttgtgacacacctcccccgt |
| | | | | gcccacggtgcccagagcccaaatcttgtgacacaactcac |
| | | | | acatgcccacggtgcccagagcccaaatcttgtgacacacc |
| | | | | tcccccgtgcccaaggtgcccagcacctgaactc |
| Linker18 | G4S (SEQ ID | 15 | 3719 | ggtggtggtggatcc |
| | NO: 4535) | | | |
| Linker19 | (G4S)2 (SEQ | 30 | 3720 | ggtggtggtggatccggtggtggtggatcc |
| | ID NO: 4539) | | | |
| Linker20 | (G4S)3 (SEQ | 45 | 3721 | ggtggtggtggatccggtggtggtggatccggtggtggtgg |
| | ID NO: 4537) | | | atcc |
| Linker21 | (G4S)4 (SEQ | 60 | 3722 | ggtggtggtggatccggtggtggtggatccggtggtggtgg |
| | ID NO: 4540) | | | atccggtggtggtggatcc |
| Linker22 | (G4S)5 (SEQ | 75 | 3723 | ggtggtggtggtagcggcggcggcggctctggtggtggtgg |
| | ID NO: 4538) | | | atccggtggtggtggatccggtggtggtggatcc |
| Linker23 | (G4S)5 (SEQ | 75 | 3724 | ggtggtggtggatccggtggtggtggatccggtggtggtgg |
| | ID NO: 4538) | | | atccggtggtggtggatccggtggtggtggatcc |
| Linker24 | (G4S)6 | 90 | 3725 | ggtggtggtggtagcggcggcggcggctctggtggtggtgg |
| | | | | atccggtggtggtggatccggtggtggtggatccggtggtg |
| | | | | gtggatcc |
| Linker25 | (G4S)8 | 120 | 3726 | ggtggtggtggtagcggcggcggcggctctggtggtggtgg |
| | | | | atccggtggtggtggatccggtggtggtggatccggtggtg |
| | | | | gtggatccggtggtggtggatccggtggtggtggatcc |
| Linker26 | (G4S)8 | 120 | 3727 | ggtggtggtggatccggtggtggtggatccggtggtggtgg |
| | | | | atccggtggtggtggatccggtggtggtggatccggtggtg |
| | | | | gtggatccggtggtggtggatccggtggtggtggatcc |
| Linker27 | (G4S)4 | 60 | 3728 | ggtggtggtggtagcggcggcggcggctctggtggtggtgg |
| | | | | atccggtggtggtggatcc |
| Linker28 | (G4S)6 | 90 | 3729 | ggtggtggtggatccggtggtggtggatccggtggtggtgg |
| | | | | atccggtggtggtggatccggtggtggtggatccggtggtg |
| | | | | gtggatcc |
| Linker29 | | 15 | 3730 | ggaggaggaggaAGT |
| Linker30 | | | 3731 | ggaggt ggaggt TCT |
| Linker31 | amino acid | | 3732 | GGCTCT |
| Linker32 | | | 3733 | ggtggtggtggatccggaggaggaggaAGTggaggtggagg |
| | | | | tTCT |
| Linker33 | amino acid | | 3734 | GGGGSGGGGSGGGGS |
| | (G4S)3 | | | |

[1555] In some embodiments, any of the payloads described herein, can have a linker, e.g. a flexible polypeptide linker, of varying lengths. For example, a (Gly4Ser)n linker, wherein n is 0, 1, 2, 3, 4, 5, 6, 7, or 8 can be used. In some embodiments, the linker comprises a (Gly4Ser)3 (SEQ ID NO: 3734). In some embodiments, the nucleotide sequence encoding the linker comprises the nucleotide sequence of SEQ ID NO: 3708, or a nucleotide sequence having at least one, two, or three but no more than four modifications, e.g., substitutions, relative to SEQ ID NO: 3708. In some embodiments, the encoded linker comprises the amino acid sequence of SEQ ID NO: 3734, or an amino acid sequence having at least one, two, or three but no more than four modifications, e.g., substitutions, relative to SEQ ID NO: 3734.

[1556] In some embodiments, any of the antibody molecules described herein can have a linker, e.g. a flexible polypeptide linker, of varying lengths, connecting the variable domains (e.g., the VH and the VL) of the antigen binding domain of the antibody molecule. For example, a (Gly4-Ser)n linker, wherein n is 0, 1, 2, 3, 4, 5, 6, 7, or 8 can be used. In some embodiments, the antibody molecule binds to tau.

[1557] In some embodiments, the encoded linker comprises an enzymatic cleavage site, e.g., for intracellular and/or extracellular cleavage. In some embodiments, the linker is cleaved to separate the VH and the VL of the antigen binding domain and/or the heavy chain and light chain of the antibody molecule (e.g., an anti-tau antibody molecule). In some embodiments, the linker is cleaved. In some embodiments, the encoded linker comprises a furin linker or a functional variant. In some embodiments, the nucleotide sequence encoding the furin linker comprises the nucleotide sequence of SEQ ID NO: 3702, a nucleotide sequence with at least 70%, 75%, 80%, 85%, 90%, 95%, or 99% sequence identity to SEQ ID NO: 3702, or a nucleotide sequence having at least one, two, or three but no more than four modifications, e.g., substitutions, relative to SEQ ID NO: 3702. In some embodiments, furin cleaves proteins downstream of a basic amino acid target sequence (e.g., Arg-X-(Arg/Lys)-Arg) (e.g., as described in Thomas, G., 2002. Nature Reviews Molecular Cell Biology 3(10): 753-66; the contents of which are herein incorporated by reference in its entirety). In some embodiments, the encoded linker comprises a 2A self-cleaving peptide (e.g., a 2A peptide derived from foot-and-mouth disease virus (F2A), porcine teschovirus-1 (P2A), Thoseaasigna virus (T2A), or equine rhinitis A virus (E2A)). In some embodiments, the encoded linker comprises a T2A self-cleaving peptide linker. In some embodiments, the nucleotide sequence encoding the T2A linker comprises the nucleotide sequence of SEQ ID NO: 3704, a nucleotide sequence with at least 70%, 75%, 80%, 85%, 90%, 95%, or 99% sequence identity to SEQ ID NO: 3704, or a nucleotide sequence having at least one, two, or three but no more than four modifications, e.g., substitutions, relative to SEQ ID NO: 3704. In some embodiments, the T2A linker comprises an amino acid sequence encoded by SEQ ID NO: 3704, or an amino acid sequence having at least one, two, or three but no more than four modifications, e.g., substitutions, relative to an amino acid sequence encoded by SEQ ID NO: 3704. In some embodiments, the nucleic acid encoding the payload encodes a furin linker and a T2A linker.

[1558] In some embodiments, the encoded linker comprises an internal ribosomal entry site (IRES) is a nucleotide sequence (>500 nucleotides) for initiation of translation in the middle of a nucleotide sequence, e.g., an mRNA sequence (Kim, J. H. et al., 2011. PLoS One 6(4): e18556; the contents of which are herein incorporated by reference in its entirety), which can be used, for example, to modulate expression of one or more transgenes. In some embodiments, the encode linker comprises a small and unbranched serine-rich peptide linker, such as those described by Huston et al. in U.S. Pat. No. 5,525,491, the contents of which are herein incorporated in their entirety. In some embodiments, polypeptides comprising a serine-rich linker has increased solubility. In some embodiments, the encoded linker comprises an artificial linker, such as those described by Whitlow and Filpula in U.S. Pat. No. 5,856,456 and Ladner et al. in U.S. Pat. No. 4,946,778, the contents of each of which are herein incorporated by their entirety.

[1559] In some embodiments, the encoded linkers comprises a cathepsin, a matrix metalloproteinases or a legumain cleavage sites, such as those described e.g. by Cizeau and Macdonald in International Publication No. WO2008052322, the contents of which are herein incorporated in their entirety.

[1560] In some embodiments, the encoded linker comprises an internal ribosomal entry site (IRES) is a nucleotide sequence (>500 nucleotides) for initiation of translation in the middle of a nucleotide sequence, e.g., an mRNA sequence (Kim, J. H. et al., 2011. PLoS One 6(4): e18556; the contents of which are herein incorporated by reference in its entirety), which can be used, for example, to modulate expression of one or more transgenes. In some embodiments, the encode linker comprises a small and unbranched serine-rich peptide linker, such as those described by Huston et al. in U.S. Pat. No. 5,525,491, the contents of which are herein incorporated in their entirety. In some embodiments, polypeptides comprising a serine-rich linker has increased solubility. In some embodiments, the encoded linker comprises an artificial linker, such as those described by Whitlow and Filpula in U.S. Pat. No. 5,856,456 and Ladner et al. in U.S. Pat. No. 4,946,778, the contents of each of which are herein incorporated by their entirety.

[1561] In some embodiments, the nucleotide sequence encoding the linker comprises about 10 to about 700 nucleotides in length, e.g., about 10 to about 700 nucleotides, e.g. about 10 to about 100, e.g., about 50-200 nucleotides, about 150-300 nucleotides, about 250-400 nucleotides, about 350-500 nucleotides, about 450-600 nucleotides, about 550-700 nucleotides, about 650-700 nucleotides. In some embodiments, the nucleotide sequence encoding the linker comprises about 5 to about 20 nucleotides in length, e.g., about 12 nucleotides in length. In some embodiments, the nucleotide sequence encoding the linker comprises about 40 to about 60 nucleotides in length, e.g., about 54 nucleotides in length.

### Payload Component: Signal Sequence

[1562] In some embodiments, the nucleic acid sequence comprising the transgene encoding the payload, e.g., an antibody molecule, comprises a nucleic acid sequence encoding a signal sequence (e.g., a signal sequence region herein). In some embodiments, the nucleic acid sequence comprising the transgene encoding the payload comprises two signal sequence regions. In some embodiments, the nucleic acid sequence comprising the transgene encoding the payload comprises three or more signal sequence regions.

[1563] In some embodiments, the nucleotide sequence encoding the signal sequence is located 5′ relative to the nucleotide sequence encoding the VH and/or the heavy chain. In some embodiments, the nucleotide sequence encoding the signal sequence is located 5′ relative to the nucleotide sequence encoding the VL and/or the light chain. In some embodiments, the encoded VH, VL, heavy chain, and/or light chain of the encoded antibody molecule comprises a signal sequence at the N-terminus, wherein the signal sequence is optionally cleaved during cellular processing and/or localization of the antibody molecule.

### Self-Complementary and Single Strand Vectors

[1564] In some embodiments, the AAV vector used in the present disclosure is a single strand vector (ssAAV).

[1565] In some embodiments, the AAV vectors may be self-complementary AAV vectors (scAAVs). See, e.g., U.S. Pat. No. 7,465,583. scAAV vectors contain both DNA strands that anneal together to form double stranded DNA. By skipping second strand synthesis, scAAVs allow for rapid expression in the cell.

[1566] In some embodiments, the AAV vector used in the present disclosure is a scAAV.

[1567] Methods for producing and/or modifying AAV vectors are disclosed in the art such as pseudotyped AAV vectors (International Patent Publication Nos. WO200028004; WO200123001; WO2004112727; WO 2005005610 and WO 2005072364, the content of each of which are incorporated herein by reference in their entirety).

### Genome Size

[1568] In one embodiment, the AAV particle described herein (e.g., an AAV particle comprising an AAV capsid polypeptide, e.g., an AAV capsid variant), may comprise a single-stranded or double-stranded viral genome. The size of the viral genome may be small, medium, large or the maximum size. As described above, the viral genome may comprise a promoter and a polyA tail.

[1569] In one embodiment, the viral genome may be a small single stranded viral genome. A small single stranded viral genome may be 2.1 to 3.5 kb in size such as, but not limited to, about 2.1, 2.2, 2.3, 2.4, 2.5, 2.6, 2.7, 2.8, 2.9, 3.0, 3.1, 3.2, 3.3, 3.4, and 3.5 kb in size.

[1570] In one embodiment, the viral genome may be a small double stranded viral genome. A small double stranded viral genome may be 1.3 to 1.7 kb in size such as, but not limited to, about 1.3, 1.4, 1.5, 1.6, and 1.7 kb in size.

[1571] In one embodiment, the viral genome may be a medium single stranded viral genome. A medium single stranded viral genome may be 3.6 to 4.3 kb in size such as, but not limited to, about 3.6, 3.7, 3.8, 3.9, 4.0, 4.1, 4.2 and 4.3 kb in size.

[1572] In one embodiment, the viral genome may be a medium double stranded viral genome. A medium double stranded viral genome may be 1.8 to 2.1 kb in size such as, but not limited to, about 1.8, 1.9, 2.0, and 2.1 kb in size.

[1573] In one embodiment, the viral genome may be a large single stranded viral genome. A large single stranded viral genome may be 4.4 to 6.0 kb in size such as, but not limited to, about 4.4, 4.5, 4.6, 4.7, 4.8, 4.9, 5.0, 5.1, 5.2, 5.3, 5.4, 5.5, 5.6, 5.7, 5.8, 5.9 and 6.0 kb in size.

[1574] In one embodiment, the viral genome may be a large double stranded viral genome. A large double stranded viral genome may be 2.2 to 3.0 kb in size such as, but not limited to, about 2.2, 2.3, 2.4, 2.5, 2.6, 2.7, 2.8, 2.9 and 3.0 kb in size.

### Backbone

[1575] In certain embodiments, a cis-element such as a vector backbone is incorporated into the viral particle encoding, e.g., an anti-tau antibody molecule described herein. Without wishing to be bound by theory, it is believed, in some embodiments, the backbone sequence may contribute to the stability of an anti-tau antibody molecule expression, and/or the level of expression of the an anti-tau antibody molecule.

[1576] The present disclosure also provides in some embodiments, a nucleic acid encoding a viral genome, an a backbone region suitable for replication of the viral genome in a cell, e.g., a bacterial cell (e.g., wherein the backbone region comprises one or both of a bacterial origin of replication and a selectable marker).

### II. Viral Production

### General Viral Production Process

[1577] Cells for the production of AAV, e.g., rAAV, particles may comprise, in some embodiments, mammalian cells (such as HEK293 cells) and/or insect cells (such as Sf9 cells).

[1578] In various embodiments, AAV production includes processes and methods for producing AAV particles and vectors which can contact a target cell to deliver a payload, e.g. a recombinant viral construct, which includes a nucleotide encoding a payload molecule. In certain embodiments, the viral vectors are adeno-associated viral (AAV) vectors such as recombinant adeno-associated viral (rAAV) vectors. In certain embodiments, the AAV particles are adeno-associated viral (AAV) particles such as recombinant adeno-associated viral (rAAV) particles.

[1579] In some embodiments, disclosed herein is a vector comprising a viral genome of the present disclosure. In some embodiments, disclosed herein is a cell comprising a viral genome of the present disclosure. In some embodiments, the cell is a bacterial cell, a mammalian cell (e.g., a HEK293 cell), or an insect cell (e.g., an Sf9 cell).

[1580] In some embodiments, disclosed herein is a method of making a viral genome. The method comprising providing a nucleic acid encoding a viral genome described herein and a backbone region suitable for replication of the viral genome in a cell, e.g., a bacterial cell (e.g., wherein the backbone region comprises one or both of a bacterial origin of replication and a selectable marker), and excising the viral genome from the backbone region, e.g., by cleaving the nucleic acid molecule at upstream and downstream of the viral genome. In some embodiments, the viral genome comprising a promoter operably linked to nucleic acid comprising a transgene encoding an anti-tau antibody molecule (e.g., an anti-tau antibody molecule described herein), will be incorporated into an AAV particle produced in the cell. In some embodiments, the cell is a bacterial cell, a mammalian cell (e.g., a HEK293 cell), or an insect cell (e.g., an Sf9 cell).

[1581] In some embodiments, disclosed herein is a method of making a recombinant AAV particle of the present disclosure, the method comprising (i) providing a host cell comprising a viral genome described herein and incubating the host cell under conditions suitable to enclose the viral genome in a capsid protein, e.g., a capsid protein described herein (e.g., a capsid protein listed in Tables 1, 3, 4, and 5, or a capsid protein comprising a peptide listed in Tables 2, 20, 23, and 24), thereby making the recombinant AAV particle. In some embodiments, the method comprises prior to step (i), introducing a first nucleic acid comprising the viral genome into a cell. In some embodiments, the host cell comprises a second nucleic acid encoding the capsid protein. In some embodiments, the second nucleic acid is introduced into the host cell prior to, concurrently with, or after the first nucleic acid molecule. In some embodiments, the host cell is a bacterial cell, a mammalian cell (e.g., a HEK293 cell), or an insect cell (e.g., an Sf9 cell).

[1582] In various embodiments, methods are provided herein of producing AAV particles or vectors by (a) contacting a viral production cell with one or more viral expression constructs encoding at least one AAV capsid protein, and one or more payload constructs encoding a payload molecule, which can be selected from: a transgene, a polynucleotide encoding protein, and a modulatory nucleic acid; (b) culturing the viral production cell under conditions such that at least one AAV particle or vector is produced, and (c) isolating the AAV particle or vector from the production stream.

[1583] In these methods, a viral expression construct may encode at least one structural protein and/or at least one non-structural protein. The structural protein may include any of the native or wild type capsid proteins VP1, VP2, and/or VP3, or a chimeric protein thereof. The non-structural protein may include any of the native or wild type Rep78, Rep68, Rep52, and/or Rep40 proteins or a chimeric protein thereof.

[1584] In certain embodiments, contacting occurs via transient transfection, viral transduction, and/or electroporation.

[1585] In certain embodiments, the viral production cell is selected from a mammalian cell and an insect cell. In certain embodiments, the insect cell includes a Spodoptera frugiperda insect cell. In certain embodiments, the insect cell includes a Sf9 insect cell. In certain embodiments, the insect cell includes a Sf21 insect cell.

[1586] The payload construct vector of the present disclosure may include, in various embodiments, at least one inverted terminal repeat (ITR) and may include mammalian DNA.

[1587] Also provided are AAV particles and viral vectors produced according to the methods described herein.

[1588] In various embodiments, the AAV particles of the present disclosure may be formulated as a pharmaceutical composition with one or more acceptable excipients.

[1589] In certain embodiments, an AAV particle or viral vector may be produced by a method described herein.

[1590] In certain embodiments, the AAV particles may be produced by contacting a viral production cell (e.g., an insect cell or a mammalian cell) with at least one viral expression construct encoding at least one capsid protein and at least one payload construct vector. The viral production cell may be contacted by transient transfection, viral transduction, and/or electroporation. The payload construct vector may include a payload construct encoding a payload molecule such as, but not limited to, a transgene, a polynucleotide encoding protein, and a modulatory nucleic acid. The viral production cell can be cultured under conditions such that at least one AAV particle or vector is produced, isolated (e.g., using temperature-induced lysis, mechanical lysis and/or chemical lysis) and/or purified (e.g., using filtration, chromatography, and/or immunoaffinity purification). As a non-limiting example, the payload construct vector may include mammalian DNA.

[1591] In certain embodiments, the AAV particles are produced in an insect cell (e.g., Spodoptera frugiperda (Sf9) cell) using a method described herein. As a non-limiting example, the insect cell is contacted using viral transduction which may include baculoviral transduction.

[1592] In certain embodiments, the AAV particles are produced in an mammalian cell (e.g., HEK293 cell) using a method described herein. As a non-limiting example, the mammalian cell is contacted using viral transduction which may include multiplasmid transient transfection (such as triple plasmid transient transfection).

[1593] In certain embodiments, the AAV particle production method described herein produces greater than 10¹, greater than 10², greater than 10³, greater than 10⁴, or greater than 10⁵ AAV particles in a viral production cell.

[1594] In certain embodiments, a process of the present disclosure includes production of viral particles in a viral production cell using a viral production system which includes at least one viral expression construct and at least one payload construct. The at least one viral expression construct and at least one payload construct can be co-transfected (e.g. dual transfection, triple transfection) into a viral production cell. The transfection is completed using standard molecular biology techniques known and routinely performed by a person skilled in the art. The viral production cell provides the cellular machinery necessary for expression of the proteins and other biomaterials necessary for producing the AAV particles, including Rep proteins which replicate the payload construct and Cap proteins which assemble to form a capsid that encloses the replicated payload constructs. The resulting AAV particle is extracted from the viral production cells and processed into a pharmaceutical preparation for administration.

[1595] In various embodiments, once administered, an AAV particle disclosed herein may, without being bound by theory, contact a target cell and enter the cell, e.g., in an endosome. The AAV particles, e.g., those released from the endosome, may subsequently contact the nucleus of the target cell to deliver the payload construct. The payload construct, e.g. recombinant viral construct, may be delivered to the nucleus of the target cell wherein the payload molecule encoded by the payload construct may be expressed.

[1596] In certain embodiments, the process for production of viral particles utilizes seed cultures of viral production cells that include one or more baculoviruses (e.g., a Baculoviral Expression Vector (BEV) or a baculovirus infected insect cell (BIIC) that has been transfected with a viral expression construct and a payload construct vector). In certain embodiments, the seed cultures are harvested, divided into aliquots and frozen, and may be used at a later time point to initiate an infection of a naïve population of production cells.

[1597] In some embodiments, large scale production of AAV particles utilizes a bioreactor. Without being bound by theory, the use of a bioreactor may allow for the precise measurement and/or control of variables that support the growth and activity of viral production cells such as mass, temperature, mixing conditions (impellor RPM or wave oscillation), CO₂ concentration, O₂ concentration, gas sparge rates and volumes, gas overlay rates and volumes, pH, Viable Cell Density (VCD), cell viability, cell diameter, and/or optical density (OD). In certain embodiments, the bioreactor is used for batch production in which the entire culture is harvested at an experimentally determined time point and AAV particles are purified. In some embodiments, the bioreactor is used for continuous production in which a portion of the culture is harvested at an experimentally determined time point for purification of AAV particles, and the remaining culture in the bioreactor is refreshed with additional growth media components.

[1598] In various embodiments, AAV viral particles can be extracted from viral production cells in a process which includes cell lysis, clarification, sterilization and purification. Cell lysis includes any process that disrupts the structure of the viral production cell, thereby releasing AAV particles. In certain embodiments, cell lysis may include thermal shock, chemical, or mechanical lysis methods. Clarification can include the gross purification of the mixture of lysed cells, media components, and AAV particles. In certain embodiments, clarification includes centrifugation and/or filtration, including but not limited to depth end, tangential flow, and/or hollow fiber filtration.

[1599] In various embodiments, the end result of viral production is a purified collection of AAV particles which include two components: (1) a payload construct (e.g. a recombinant AAV vector genome construct) and (2) a viral capsid.

[1600] In certain embodiments, a viral production system or process of the present disclosure includes steps for producing baculovirus infected insect cells (BIICs) using Viral Production Cells (VPC) and plasmid constructs. Viral Production Cells (VPCs) from a Cell Bank (CB) are thawed and expanded to provide a target working volume and VPC concentration. The resulting pool of VPCs is split into a Rep/Cap VPC pool and a Payload VPC pool. One or more Rep/Cap plasmid constructs (viral expression constructs) are processed into Rep/Cap Bacmid polynucleotides and transfected into the Rep/Cap VPC pool. One or more Payload plasmid constructs (payload constructs) are processed into Payload Bacmid polynucleotides and transfected into the Payload VPC pool. The two VPC pools are incubated to produce P1 Rep/Cap Baculoviral Expression Vectors (BEVs) and P1 Payload BEVs. The two BEV pools are expanded into a collection of Plaques, with a single Plaque being selected for Clonal Plaque (CP) Purification (also referred to as Single Plaque Expansion). The process can include a single CP Purification step or can include multiple CP Purification steps either in series or separated by other processing steps. The one-or-more CP Purification steps provide a CP Rep/Cap BEV pool and a CP Payload BEV pool. These two BEV pools can then be stored and used for future production steps, or they can be then transfected into VPCs to produce a Rep/Cap BIIC pool and a Payload BIIC pool.

[1601] In certain embodiments, a viral production system or process of the present disclosure includes steps for producing AAV particles using Viral Production Cells (VPC) and baculovirus infected insect cells (BIICs). Viral Production Cells (VPCs) from a Cell Bank (CB) are thawed and expanded to provide a target working volume and VPC concentration. The working volume of Viral Production Cells is seeded into a Production Bioreactor and can be further expanded to a working volume of 200-2000 L with a target VPC concentration for BIIC infection. The working volume of VPCs in the Production Bioreactor is then co-infected with Rep/Cap BIICs and Payload BIICs, with a target VPC:BIIC ratio and a target BIIC:BIIC ratio. VCD infection can also utilize BEVs. The co-infected VPCs are incubated and expanded in the Production Bioreactor to produce a bulk harvest of AAV particles and VPCs.

### Viral Expression Constructs

[1602] In various embodiments, the viral production system of the present disclosure includes one or more viral expression constructs that can be transfected/transduced into a viral production cell. In certain embodiments, a viral expression construct or a payload construct of the present disclosure can be a bacmid, also known as a baculovirus plasmid or recombinant baculovirus genome. In certain embodiments, the viral expression includes a protein-coding nucleotide sequence and at least one expression control sequence for expression in a viral production cell. In certain embodiments, the viral expression includes a protein-coding nucleotide sequence operably linked to least one expression control sequence for expression in a viral production cell. In certain embodiments, the viral expression construct contains parvoviral genes under control of one or more promoters. Parvoviral genes can include nucleotide sequences encoding non-structural AAV replication proteins, such as Rep genes which encode Rep52, Rep40, Rep68, or Rep78 proteins. Parvoviral genes can include nucleotide sequences encoding structural AAV proteins, such as Cap genes which encode VP1, VP2, and VP3 proteins.

[1603] Viral expression constructs of the present disclosure may include any compound or formulation, biological or chemical, which facilitates transformation, transfection, or transduction of a cell with a nucleic acid. Exemplary biological viral expression constructs include plasmids, linear nucleic acid molecules, and recombinant viruses including baculovirus. Exemplary chemical vectors include lipid complexes. Viral expression constructs are used to incorporate nucleic acid sequences into virus replication cells in accordance with the present disclosure. (O'Reilly, David R., Lois K. Miller, and Verne A. Luckow. Baculovirus expression vectors: a laboratory manual. Oxford University Press, 1994.); Maniatis et al., eds. Molecular Cloning. CSH Laboratory, NY, N.Y. (1982); and, Philiport and Scluber, eds. Liposomes as tools in Basic Research and Industry. CRC Press, Ann Arbor, Mich. (1995), the contents of each of which are herein incorporated by reference in their entirety as related to viral expression constructs and uses thereof.

[1604] In certain embodiments, the viral expression construct is an AAV expression construct which includes one or more nucleotide sequences encoding non-structural AAV replication proteins, structural AAV capsid proteins, or a combination thereof.

[1605] In certain embodiments, the viral expression construct of the present disclosure may be a plasmid vector. In certain embodiments, the viral expression construct of the present disclosure may be a baculoviral construct.

[1606] The present disclosure is not limited by the number of viral expression constructs employed to produce AAV particles or viral vectors. In certain embodiments, one, two, three, four, five, six, or more viral expression constructs can be employed to produce AAV particles in viral production cells in accordance with the present disclosure. In certain embodiments of the present disclosure, a viral expression construct may be used for the production of an AAV particles in insect cells. In certain embodiments, modifications may be made to the wild type AAV sequences of the capsid and/or rep genes, for example to improve attributes of the viral particle, such as increased infectivity or specificity, or to enhance production yields.

[1607] In certain embodiments, the viral expression construct may contain a nucleotide sequence which includes start codon region, such as a sequence encoding AAV capsid proteins which include one or more start codon regions. In certain embodiments, the start codon region can be within an expression control sequence. The start codon can be ATG or a non-ATG codon (i.e., a suboptimal start codon where the start codon of the AAV VP1 capsid protein is a non-ATG).

[1608] In certain embodiments, the viral expression construct used for AAV production may contain a nucleotide sequence encoding the AAV capsid proteins where the initiation codon of the AAV VP1 capsid protein is a non-ATG, i.e., a suboptimal initiation codon, allowing the expression of a modified ratio of the viral capsid proteins in the production system, to provide improved infectivity of the host cell. In a non-limiting example, a viral construct vector may contain a nucleic acid construct comprising a nucleotide sequence encoding AAV VP1, VP2, and VP3 capsid proteins, wherein the initiation codon for translation of the AAV VP1 capsid protein is CTG, TTG, or GTG, as described in U.S. Pat. No. 8,163,543, the contents of which are herein incorporated by reference in their entirety as related to AAV capsid proteins and the production thereof.

[1609] In certain embodiments, the viral expression construct of the present disclosure may be a plasmid vector or a baculoviral construct that encodes the parvoviral rep proteins for expression in insect cells. In certain embodiments, a single coding sequence is used for the Rep78 and Rep52 proteins, wherein start codon for translation of the Rep78 protein is a suboptimal start codon, selected from the group consisting of ACG, TTG, CTG, and GTG, that effects partial exon skipping upon expression in insect cells, as described in U.S. Pat. No. 8,512,981, the contents of which are herein incorporated by reference in their entirety, for example to promote less abundant expression of Rep78 as compared to Rep52, which may promote high vector yields.

[1610] In certain embodiments, a VP-coding region encodes one or more AAV capsid proteins of a specific AAV serotype. The AAV serotypes for VP-coding regions can be the same or different. In certain embodiments, a VP-coding region can be codon optimized. In certain embodiments, a VP-coding region or nucleotide sequence can be codon optimized for a mammal cell. In certain embodiments, a VP-coding region or nucleotide sequence can be codon optimized for an insect cell. In certain embodiments, a VP-coding region or nucleotide sequence can be codon optimized for a Spodoptera frugiperda cell. In certain embodiments, a VP-coding region or nucleotide sequence can be codon optimized for Sf9 or Sf21 cell lines.

[1611] In certain embodiments, a nucleotide sequence encoding one or more VP capsid proteins can be codon optimized to have a nucleotide homology with the reference nucleotide sequence of less than 100%. In certain embodiments, the nucleotide homology between the codon-optimized VP nucleotide sequence and the reference VP nucleotide sequence is less than 100%, less than 99%, less than 98%, less than 97%, less than 96%, less than 95%, less than 94%, less than 93%, less than 92%, less than 91%, less than 90%, less than 89%, less than 88%, less than 87%, less than 86%, less than 85%, less than 84%, less than 83%, less than 82%, less than 81%, less than 80%, less than 78%, less than 76%, less than 74%, less than 72%, less than 70%, less than 68%, less than 66%, less than 64%, less than 62%, less than 60%, less than 55%, less than 50%, and less than 40%.

[1612] In certain embodiments, a viral expression construct or a payload construct of the present disclosure can be a bacmid, also known as a baculovirus plasmid or recombinant baculovirus genome. In certain embodiments, a viral expression construct or a payload construct of the present disclosure (e.g. bacmid) can include a polynucleotide incorporated by homologous recombination (transposon donor/acceptor system) into the bacmid by standard molecular biology techniques known and performed by a person skilled in the art.

[1613] In certain embodiments, the polynucleotide incorporated into the bacmid (i.e. polynucleotide insert) can include an expression control sequence operably linked to a protein-coding nucleotide sequence. In certain embodiments, the polynucleotide incorporated into the bacmid can include an expression control sequence which includes a promoter, such as p10 or polh, and which is operably linked to a nucleotide sequence which encodes a structural AAV capsid protein (e.g. VP1, VP2, VP3 or a combination thereof). In certain embodiments, the polynucleotide incorporated into the bacmid can include an expression control sequence which includes a promoter, such as p10 or polh, and which is operably linked to a nucleotide sequence which encodes a non-structural AAV capsid protein (e.g. Rep78, Rep52, or a combination thereof).

[1614] The method of the present disclosure is not limited by the use of specific expression control sequences. However, when a certain stoichiometry of VP products are achieved (close to 1:1:10 for VP1, VP2, and VP3, respectively) and also when the levels of Rep52 or Rep40 (also referred to as the p19 Reps) are significantly higher than Rep78 or Rep68 (also referred to as the p5 Reps), improved yields of AAV in production cells (such as insect cells) may be obtained. In certain embodiments, the p5/p19 ratio is below 0.6 more, below 0.4, or below 0.3, but always at least 0.03. These ratios can be measured at the level of the protein or can be implicated from the relative levels of specific mRNAs.

[1615] In certain embodiments, AAV particles are produced in viral production cells (such as mammalian or insect cells) wherein all three VP proteins are expressed at a stoichiometry approaching, about or which is: 1:1:10 (VP1:VP2:VP3); 2:2:10 (VP1:VP2:VP3); 2:0:10 (VP1:VP2:VP3); 1-2:0-2:10 (VP1:VP2:VP3); 1-2:1-2:10 (VP1:VP2:VP3); 2-3:0-3:10 (VP1:VP2:VP3); 2-3:2-3:10 (VP1:VP2:VP3); 3:3:10 (VP1:VP2:VP3); 3-5:0-5:10 (VP1:VP2:VP3); or 3-5:3-5:10 (VP1:VP2:VP3).

[1616] In certain embodiments, the expression control regions are engineered to produce a VP1:VP2:VP3 ratio selected from the group consisting of: about or exactly 1:0:10; about or exactly 1:1:10; about or exactly 2:1:10; about or exactly 2:1:10; about or exactly 2:2:10; about or exactly 3:0:10; about or exactly 3:1:10; about or exactly 3:2:10; about or exactly 3:3:10; about or exactly 4:0:10; about or exactly 4:1:10; about or exactly 4:2:10; about or exactly 4:3:10; about or exactly 4:4:10; about or exactly 5:5:10; about or exactly 1-2:0-2:10; about or exactly 1-2:1-2:10; about or exactly 1-3:0-3:10; about or exactly 1-3:1-3:10; about or exactly 1-4:0-4:10; about or exactly 1-4:1-4:10; about or exactly 1-5:1-5:10; about or exactly 2-3:0-3:10; about or exactly 2-3:2-3:10; about or exactly 2-4:2-4:10; about or exactly 2-5:2-5:10; about or exactly 3-4:3-4:10; about or exactly 3-5:3-5:10; and about or exactly 4-5:4-5:10.

[1617] In certain embodiments of the present disclosure, Rep52 or Rep78 is transcribed from the baculoviral derived polyhedron promoter (polh). Rep52 or Rep78 can also be transcribed from a weaker promoter, for example a deletion mutant of the ie-1 promoter, the Δie-1 promoter, has about 20% of the transcriptional activity of that ie-1 promoter. A promoter substantially homologous to the Δie-1 promoter may be used. In respect to promoters, a homology of at least 50%, 60%, 70%, 80%, 90% or more, is considered to be a substantially homologous promoter.

### Mammalian Cells

[1618] Viral production of the present disclosure disclosed herein describes processes and methods for producing AAV particles or viral vector that contacts a target cell to deliver a payload construct, e.g. a recombinant AAV particle or viral construct, which includes a nucleotide encoding a payload molecule. The viral production cell may be selected from any biological organism, including prokaryotic (e.g., bacterial) cells, and eukaryotic cells, including, insect cells, yeast cells and mammalian cells.

[1619] In certain embodiments, the AAV particles of the present disclosure may be produced in a viral production cell that includes a mammalian cell. Viral production cells may comprise mammalian cells such as A549, WEH1, 3T3, 10T1/2, BHK, MDCK, COS 1, COS 7, BSC 1, BSC 40, BMT 10, VERO, W138, HeLa, HEK293, HEK293T (293T), Saos, C2C12, L cells, HT1080, Huh7, HepG2, C127, 3T3, CHO, HeLa cells, KB cells, BHK and primary fibroblast, hepatocyte, and myoblast cells derived from mammals. Viral production cells can include cells derived from any mammalian species including, but not limited to, human, monkey, mouse, rat, rabbit, and hamster or cell type, including but not limited to fibroblast, hepatocyte, tumor cell, cell line transformed cell, etc.

[1620] AAV viral production cells commonly used for production of recombinant AAV particles include, but is not limited to other mammalian cell lines as described in U.S. Pat. Nos. 6,156,303, 5,387,484, 5,741,683, 5,691,176, 6,428,988 and 5,688,676; U.S. patent application 2002/0081721, and International Patent Publication Nos. WO 00/47757, WO 00/24916, and WO 96/17947, the contents of each of which are herein incorporated by reference in their entireties insofar as they do no conflict with the present disclosure. In certain embodiments, the AAV viral production cells are trans-complementing packaging cell lines that provide functions deleted from a replication-defective helper virus, e.g., HEK293 cells or other Ea trans-complementing cells.

[1621] In certain embodiments, the packaging cell line 293-10-3 (ATCC Accession No. PTA-2361) may be used to produce the AAV particles, as described in U.S. Pat. No. 6,281,010, the contents of which are herein incorporated by reference in their entirety as related to the 293-10-3 packaging cell line and uses thereof.

[1622] In certain embodiments, of the present disclosure a cell line, such as a HeLA cell line, for trans-complementing E1 deleted adenoviral vectors, which encoding adenovirus E1a and adenovirus E1b under the control of a phosphoglycerate kinase (PGK) promoter can be used for AAV particle production as described in U.S. Pat. No. 6,365,394, the contents of which are incorporated herein by reference in their entirety as related to the HeLa cell line and uses thereof.

[1623] In certain embodiments, AAV particles are produced in mammalian cells using a multiplasmid transient transfection method (such as triple plasmid transient transfection). In certain embodiments, the multiplasmid transient transfection method includes transfection of the following three different constructs: (i) a payload construct, (ii) a Rep/Cap construct (parvoviral Rep and parvoviral Cap), and (iii) a helper construct. In certain embodiments, the triple transfection method of the three components of AAV particle production may be utilized to produce small lots of virus for assays including transduction efficiency, target tissue (tropism) evaluation, and stability. In certain embodiments, the triple transfection method of the three components of AAV particle production may be utilized to produce large lots of materials for clinical or commercial applications.

[1624] AAV particles to be formulated may be produced by triple transfection or baculovirus mediated virus production, or any other method known in the art. Any suitable permissive or packaging cell known in the art may be employed to produce the vectors. In certain embodiments, trans-complementing packaging cell lines are used that provide functions deleted from a replication-defective helper virus, e.g., 293 cells or other E1a trans-complementing cells.

[1625] The gene cassette may contain some or all of the parvovirus (e.g., AAV) cap and rep genes. In certain embodiments, some or all of the cap and rep functions are provided in trans by introducing a packaging vector(s) encoding the capsid and/or Rep proteins into the cell. In certain embodiments, the gene cassette does not encode the capsid or Rep proteins. Alternatively, a packaging cell line is used that is stably transformed to express the cap and/or rep genes.

[1626] Recombinant AAV virus particles are, in certain embodiments, produced and purified from culture supernatants according to the procedure as described in US2016/0032254, the contents of which are incorporated by reference in their entirety as related to the production and processing of recombinant AAV virus particles. Production may also involve methods known in the art including those using 293T cells, triple transfection or any suitable production method.

[1627] In certain embodiments, mammalian viral production cells (e.g. 293T cells) can be in an adhesion/adherent state (e.g. with calcium phosphate) or a suspension state (e.g. with polyethyleneimine (PEI)). The mammalian viral production cell is transfected with plasmids required for production of AAV, (i.e., AAV rep/cap construct, an adenoviral helper construct, and/or ITR flanked payload construct). In certain embodiments, the transfection process can include optional medium changes (e.g. medium changes for cells in adhesion form, no medium changes for cells in suspension form, medium changes for cells in suspension form if desired). In certain embodiments, the transfection process can include transfection mediums such as DMEM or F17. In certain embodiments, the transfection medium can include serum or can be serum-free (e.g. cells in adhesion state with calcium phosphate and with serum, cells in suspension state with PEI and without serum).

[1628] Cells can subsequently be collected by scraping (adherent form) and/or pelleting (suspension form and scraped adherent form) and transferred into a receptacle. Collection steps can be repeated as necessary for full collection of produced cells. Next, cell lysis can be achieved by consecutive freeze-thaw cycles (−80 C to 37 C), chemical lysis (such as adding detergent triton), mechanical lysis, or by allowing the cell culture to degrade after reaching ˜0% viability. Cellular debris is removed by centrifugation and/or depth filtration. The samples are quantified for AAV particles by DNase resistant genome titration by DNA qPCR.

[1629] AAV particle titers are measured according to genome copy number (genome particles per milliliter). Genome particle concentrations are based on DNA qPCR of the vector DNA as previously reported (Clark et al. (1999) Hum. Gene Ther., 10:1031-1039; Veldwijk et al. (2002) Mol. Ther., 6:272-278, the contents of which are each incorporated by reference in their entireties as related to the measurement of particle concentrations).

### Insect Cells

[1630] Viral production of the present disclosure includes processes and methods for producing AAV particles or viral vectors that contact a target cell to deliver a payload construct, e.g., a recombinant viral construct, which includes a nucleotide encoding a payload molecule. In certain embodiments, the AAV particles or viral vectors of the present disclosure may be produced in a viral production cell that includes an insect cell.

[1631] Growing conditions for insect cells in culture, and production of heterologous products in insect cells in culture are well-known in the art, see U.S. Pat. No. 6,204,059, the contents of which are herein incorporated by reference in their entirety as related to the growth and use of insect cells in viral production.

[1632] Any insect cell which allows for replication of parvovirus and which can be maintained in culture can be used in accordance with the present disclosure. AAV viral production cells commonly used for production of recombinant AAV particles include, but is not limited to, Spodoptera frugiperda, including, but not limited to the Sf9 or Sf21 cell lines, Drosophila cell lines, or mosquito cell lines, such as Aedes albopictus derived cell lines. Use of insect cells for expression of heterologous proteins is well documented, as are methods of introducing nucleic acids, such as vectors, e.g., insect-cell compatible vectors, into such cells and methods of maintaining such cells in culture. See, for example, Methods in Molecular Biology, ed. Richard, Humana Press, NJ (1995); O'Reilly et al., Baculovirus Expression Vectors, A Laboratory Manual, Oxford Univ. Press (1994); Samulski et al., J. Vir. 63:3822-8 (1989); Kajigaya et al., Proc. Nat'l. Acad. Sci. USA 88: 4646-50 (1991); Ruffing et al., J. Vir. 66:6922-30 (1992); Kimbauer et al., Vir. 219:37-44 (1996); Zhao et al., Vir. 272:382-93 (2000); and Samulski et al., U.S. Pat. No. 6,204,059, the contents of each of which are herein incorporated by reference in their entirety as related to the use of insect cells in viral production.

[1633] In some embodiments, the AAV particles are made using the methods described in WO2015/191508, the contents of which are herein incorporated by reference in their entirety insofar as they do not conflict with the present disclosure.

[1634] In certain embodiments, insect host cell systems, in combination with baculoviral systems (e.g., as described by Luckow et al., Bio/Technology 6: 47 (1988)) may be used. In certain embodiments, an expression system for preparing chimeric peptide is Trichoplusia ni, Tn 5B1-4 insect cells/baculoviral system, which can be used for high levels of proteins, as described in U.S. Pat. No. 6,660,521, the contents of which are herein incorporated by reference in their entirety as related to the production of viral particles.

[1635] Expansion, culturing, transfection, infection and storage of insect cells can be carried out in any cell culture media, cell transfection media or storage media known in the art, including Hyclone™ SFX-Insect™ Cell Culture Media, Expression System ESF AF™ Insect Cell Culture Medium, ThermoFisher Sf-900II™ media, ThermoFisher Sf-900III™ media, or ThermoFisher Grace's Insect Media. Insect cell mixtures of the present disclosure can also include any of the formulation additives or elements described in the present disclosure, including (but not limited to) salts, acids, bases, buffers, surfactants (such as Poloxamer 188/Pluronic F-68), and other known culture media elements. Formulation additives can be incorporated gradually or as “spikes” (incorporation of large volumes in a short time).

### Baculovirus-Production Systems

[1636] In certain embodiments, processes of the present disclosure can include production of AAV particles or viral vectors in a baculoviral system using a viral expression construct and a payload construct vector. In certain embodiments, the baculoviral system includes Baculovirus expression vectors (BEVs) and/or baculovirus infected insect cells (BIICs). In certain embodiments, a viral expression construct or a payload construct of the present disclosure can be a bacmid, also known as a baculovirus plasmid or recombinant baculovirus genome. In certain embodiments, a viral expression construct or a payload construct of the present disclosure can be polynucleotide incorporated by homologous recombination (transposon donor/acceptor system) into a bacmid by standard molecular biology techniques known and performed by a person skilled in the art. Transfection of separate viral replication cell populations produces two or more groups (e.g. two, three) of baculoviruses (BEVs), one or more group which can include the viral expression construct (Expression BEV), and one or more group which can include the payload construct (Payload BEV). The baculoviruses may be used to infect a viral production cell for production of AAV particles or viral vector.

[1637] In certain embodiments, the process includes transfection of a single viral replication cell population to produce a single baculovirus (BEV) group which includes both the viral expression construct and the payload construct. These baculoviruses may be used to infect a viral production cell for production of AAV particles or viral vector.

[1638] In certain embodiments, BEVs are produced using a Bacmid Transfection agent, such as Promega FuGENE® HD, WFI water, or ThermoFisher Cellfectin® II Reagent. In certain embodiments, BEVs are produced and expanded in viral production cells, such as an insect cell.

[1639] In certain embodiments, the method utilizes seed cultures of viral production cells that include one or more BEVs, including baculovirus infected insect cells (BIICs). The seed BIICs have been transfected/transduced/infected with an Expression BEV which includes a viral expression construct, and also a Payload BEV which includes a payload construct. In certain embodiments, the seed cultures are harvested, divided into aliquots and frozen, and may be used at a later time to initiate transfection/transduction/infection of a naïve population of production cells. In certain embodiments, a bank of seed BIICs is stored at −80° C. or in LN2 vapor.

[1640] Baculoviruses are made of several essential proteins which are essential for the function and replication of the Baculovirus, such as replication proteins, envelope proteins and capsid proteins. The Baculovirus genome thus includes several essential-gene nucleotide sequences encoding the essential proteins. As a non-limiting example, the genome can include an essential-gene region which includes an essential-gene nucleotide sequence encoding an essential protein for the Baculovirus construct. The essential protein can include: GP64 baculovirus envelope protein, VP39 baculovirus capsid protein, or other similar essential proteins for the Baculovirus construct.

[1641] Baculovirus expression vectors (BEV) for producing AAV particles in insect cells, including but not limited to Spodoptera frugiperda (Sf9) cells, provide high titers of viral vector product. Recombinant baculovirus encoding the viral expression construct and payload construct initiates a productive infection of viral vector replicating cells. Infectious baculovirus particles released from the primary infection secondarily infect additional cells in the culture, exponentially infecting the entire cell culture population in a number of infection cycles that is a function of the initial multiplicity of infection, see Urabe, M. et al. J Virol. 2006 February; 80(4):1874-85, the contents of which are herein incorporated by reference in their entirety as related to the production and use of BEVs and viral particles.

[1642] Production of AAV particles with baculovirus in an insect cell system may address known baculovirus genetic and physical instability.

[1643] In certain embodiments, the production system of the present disclosure addresses baculovirus instability over multiple passages by utilizing a titerless infected-cells preservation and scale-up system. Small scale seed cultures of viral producing cells are transfected with viral expression constructs encoding the structural and/or non-structural components of the AAV particles. Baculovirus-infected viral producing cells are harvested into aliquots that may be cryopreserved in liquid nitrogen; the aliquots retain viability and infectivity for infection of large scale viral producing cell culture. Wasilko D J et al. Protein Expr Purif. 2009 June; 65(2):122-32, the contents of which are herein incorporated by reference in their entirety as related to the production and use of BEVs and viral particles.

[1644] A genetically stable baculovirus may be used to produce a source of the one or more of the components for producing AAV particles in invertebrate cells. In certain embodiments, defective baculovirus expression vectors may be maintained episomally in insect cells. In such embodiments, the corresponding bacmid vector is engineered with replication control elements, including but not limited to promoters, enhancers, and/or cell-cycle regulated replication elements.

[1645] In certain embodiments, stable viral producing cells permissive for baculovirus infection are engineered with at least one stable integrated copy of any of the elements necessary for AAV replication and vector production including, but not limited to, the entire AAV genome, Rep and Cap genes, Rep genes, Cap genes, each Rep protein as a separate transcription cassette, each VP protein as a separate transcription cassette, the AAP (assembly activation protein), or at least one of the baculovirus helper genes with native or non-native promoters.

[1646] In some embodiments, the AAV particle of the present disclosure may be produced in insect cells (e.g., Sf9 cells).

[1647] In some embodiments, the AAV particle of the present disclosure may be produced using triple transfection.

[1648] In some embodiments, the AAV particle of the present disclosure may be produced in mammalian cells.

[1649] In some embodiments, the AAV particle of the present disclosure may be produced by triple transfection in mammalian cells.

[1650] In some embodiments, the AAV particle of the present disclosure may be produced by triple transfection in HEK293 cells.

[1651] The AAV viral genomes encoding an anti-tau antibody molecule described herein may be useful in the fields of human disease, veterinary applications and a variety of in vivo and in vitro settings. The AAV particles of the present disclosure may be useful in the field of medicine for the treatment, prophylaxis, palliation, or amelioration of neurological or neuromuscular diseases and/or disorders. In some embodiments, the AAV particles of the disclosure are used for the prevention and/or treatment of tau-related disorders.

[1652] Various embodiments of the disclosure herein provide a pharmaceutical composition comprising the AAV particle described herein and a pharmaceutically acceptable excipient.

[1653] Various embodiments of the disclosure herein provide a method of treating a subject in need thereof comprising administering to the subject a therapeutically effective amount of the pharmaceutical composition described herein.

[1654] Certain embodiments of the method provide that the subject is treated by a route of administration of the pharmaceutical composition selected from the group consisting of: intravenous, intracerebroventricular, intraparenchymal, intrathecal, subpial, and intramuscular, or a combination thereof. Certain embodiments of the method provide that the subject is treated for tau-related disorders and/or other neurological disorder arising from a deficiency in the quantity or function of tau gene products. In one aspect of the method, a pathological feature of the tau-related disorders or the other neurological disorder is alleviated and/or the progression of the tau-related disorders or the other neurological disorder is halted, slowed, ameliorated, or reversed.

[1655] Also described herein are compositions, methods, processes, kits and devices for the design, preparation, manufacture and/or formulation of AAV particles. In some embodiments, payloads, such as but not limited to payloads comprising an anti-tau antibody molecule, may be encoded by payload constructs or contained within plasmids or vectors or recombinant adeno-associated viruses (AAVs).

[1656] The present disclosure also provides administration and/or delivery methods for vectors and viral particles, e.g., AAV particles, for the treatment or amelioration of tau-related disorders. Such methods may involve gene replacement or gene activation. Such outcomes are achieved by utilizing the methods and compositions taught herein.

### III. Pharmaceutical Compositions

[1657] The present disclosure additionally provides a method for treating tau-related disorders and disorders related to the abnormal function or expression of tau in a mammalian subject, including a human subject, comprising administering to the subject any of the AAV polynucleotides or AAV genomes described herein (i.e., “vector genomes,” “viral genomes,” or “VGs”) or administering to the subject a particle comprising said AAV polynucleotide or AAV genome, or administering to the subject any of the described compositions, including pharmaceutical compositions.

[1658] The AAV particle described herein may be prepared as a pharmaceutical composition. In some embodiments, the pharmaceutical composition comprises at least one active ingredients. In some embodiments, the pharmaceutical composition comprises a pharmaceutically acceptable excipient.

[1659] Although the descriptions of pharmaceutical compositions, e.g., AAV comprising a payload encoding an anti-tau antibody molecule to be delivered, provided herein are principally directed to pharmaceutical compositions which are suitable for administration to humans, it will be understood by the skilled artisan that such compositions are generally suitable for administration to any other animal, e.g., to non-human animals, e.g. non-human mammals. Modification of pharmaceutical compositions suitable for administration to humans in order to render the compositions suitable for administration to various animals is well understood, and the ordinarily skilled veterinary pharmacologist can design and/or perform such modification with merely ordinary, if any, experimentation. Subjects to which administration of the pharmaceutical compositions is contemplated include, but are not limited to, humans and/or other primates; mammals, including commercially relevant mammals such as cattle, pigs, horses, sheep, cats, dogs, mice, and/or rats; and/or birds, including commercially relevant birds such as poultry, chickens, ducks, geese, and/or turkeys.

[1660] In some embodiments, compositions are administered to humans, human patients, or subjects.

[1661] In some embodiments, the AAV particle formulations described herein may contain a nucleic acid encoding at least one payload. In some embodiments, the formulations may contain a nucleic acid encoding 1, 2, 3, 4, or 5 payloads. In some embodiments, the formulation may contain a nucleic acid encoding a payload construct encoding proteins selected from categories such as, but not limited to, human proteins, veterinary proteins, bacterial proteins, biological proteins, antibodies, immunogenic proteins, therapeutic peptides and proteins, secreted proteins, plasma membrane proteins, cytoplasmic proteins, cytoskeletal proteins, intracellular membrane bound proteins, nuclear proteins, proteins associated with human disease, and/or proteins associated with non-human diseases. In some embodiments, the formulation contains at least three payload constructs encoding proteins. Certain embodiments provide that at least one of the payloads is an anti-tau antibody molecule.

[1662] A pharmaceutical composition in accordance with the present disclosure may be prepared, packaged, and/or sold in bulk, as a single unit dose, and/or as a plurality of single unit doses. As used herein, a “unit dose” refers to a discrete amount of the pharmaceutical composition comprising a predetermined amount of the active ingredient. The amount of the active ingredient is generally equal to the dosage of the active ingredient which would be administered to a subject and/or a convenient fraction of such a dosage such as, for example, one-half or one-third of such a dosage.

### IV. Formulations

[1663] Formulations of the AAV pharmaceutical compositions described herein may be prepared by any method known or hereafter developed in the art of pharmacology. In general, such preparatory methods include the step of bringing the active ingredient into association with an excipient and/or one or more other accessory ingredients, and then, if necessary and/or desirable, dividing, shaping and/or packaging the product into a desired single- or multi-dose unit.

[1664] Relative amounts of the active ingredient, the pharmaceutically acceptable excipient, and/or any additional ingredients in a pharmaceutical composition in accordance with the disclosure will vary, depending upon the identity, size, and/or condition of the subject treated and further depending upon the route by which the composition is to be administered.

[1665] For example, the composition may comprise between 0.1% and 99% (w/w) of the active ingredient. By way of example, the composition may comprise between 0.1% and 100%, e.g., between 0.5% and 50%, between 1-30%, between 5-80%, or at least 80% (w/w) active ingredient.

[1666] The AAV particles of the disclosure can be formulated using one or more excipients to: (1) increase stability; (2) increase cell transfection or transduction; (3) permit the sustained or delayed release; (4) alter the biodistribution (e.g., target the viral particle to specific tissues or cell types); (5) increase the translation of encoded protein in vivo; (6) alter the release profile of encoded protein in vivo and/or (7) allow for regulatable expression of the payload.

[1667] Formulations of the present disclosure can include, without limitation, saline, lipidoids, liposomes, lipid nanoparticles, polymers, lipoplexes, core-shell nanoparticles, peptides, proteins, cells transfected with viral vectors (e.g., for transplantation into a subject), nanoparticle mimics and combinations thereof. Further, the viral vectors of the present disclosure may be formulated using self-assembled nucleic acid nanoparticles.

[1668] In some embodiments, the viral vectors encoding an anti-tau antibody molecule may be formulated to optimize baricity and/or osmolality. In some embodiments, the baricity and/or osmolality of the formulation may be optimized to ensure optimal drug distribution in the central nervous system or a region or component of the central nervous system.

[1669] In some embodiments, the AAV particles of the disclosure may be formulated in PBS with 0.001% of pluronic acid (F-68) at a pH of about 7.0.

[1670] In some embodiments, the AAV particles of the disclosure may be formulated in PBS, in combination with an ethylene oxide/propylene oxide copolymer (also known as pluronic or poloxamer).

[1671] In some embodiments, the AAV particles of the disclosure may be formulated in PBS with 0.001% pluronic acid (F-68) (poloxamer 188) at a pH of about 7.0.

[1672] In some embodiments, the AAV particles of the disclosure may be formulated in PBS with 0.001% pluronic acid (F-68) (poloxamer 188) at a pH of about 7.3.

[1673] In some embodiments, the AAV particles of the disclosure may be formulated in PBS with 0.001% pluronic acid (F-68) (poloxamer 188) at a pH of about 7.4.

[1674] In some embodiments, the AAV particles of the disclosure may be formulated in a solution comprising sodium chloride, sodium phosphate and an ethylene oxide/propylene oxide copolymer.

[1675] In some embodiments, the AAV particles of the disclosure may be formulated in a solution comprising sodium chloride, sodium phosphate dibasic, potassium chloride, potassium phosphate monobasic, and poloxamer 188/pluronic acid (F-68).

[1676] In some embodiments, the AAV particles of the disclosure may be formulated in a solution comprising 192 mM sodium chloride, 10 mM sodium phosphate (dibasic), 2.7 mM potassium chloride, 2 mM potassium phosphate (monobasic) and 0.001% pluronic F-68 (v/v), at pH 7.4. This formulation is referred to as Formulation 1 in the present disclosure.

[1677] In some embodiments, the AAV particles of the disclosure may be formulated in a solution comprising about 192 mM sodium chloride, about 10 mM sodium phosphate dibasic and about 0.001% poloxamer 188, at a pH of about 7.3. The concentration of sodium chloride in the final solution may be 150 mM-200 mM. As non-limiting examples, the concentration of sodium chloride in the final solution may be 150 mM, 160 mM, 170 mM, 180 mM, 190 mM or 200 mM. The concentration of sodium phosphate dibasic in the final solution may be 1 mM-50 mM. As non-limiting examples, the concentration of sodium phosphate dibasic in the final solution may be 1 mM, 2 mM, 3 mM, 4 mM, 5 mM, 6 mM, 7 mM, 8 mM, 9 mM, 10 mM, 15 mM, 20 mM, 25 mM, 30 mM, 40 mM, or 50 mM. The concentration of poloxamer 188 (pluronic acid (F-68)) may be 0.0001%-1%. As non-limiting examples, the concentration of poloxamer 188 (pluronic acid (F-68)) may be 0.0001%, 0.0005%, 0.001%, 0.005%, 0.01%, 0.05%, 0.1%, 0.5%, or 1%. The final solution may have a pH of 6.8-7.7. Non-limiting examples for the pH of the final solution include a pH of 6.8, 6.9, 7.0, 7.1, 7.2, 7.3, 7.4, 7.5, 7.6, or 7.7.

[1678] In some embodiments, the AAV particles of the disclosure may be formulated in a solution comprising about 1.05% sodium chloride, about 0.212% sodium phosphate dibasic, heptahydrate, about 0.025% sodium phosphate monobasic, monohydrate, and 0.001% poloxamer 188, at a pH of about 7.4. As a non-limiting example, the concentration of AAV particle in this formulated solution may be about 0.001%. The concentration of sodium chloride in the final solution may be 0.1-2.0%, with non-limiting examples of 0.1%, 0.25%, 0.5%, 0.75%, 0.95%, 0.96%, 0.97%, 0.98%, 0.99%, 1.00%, 1.01%, 1.02%, 1.03%, 1.04%, 1.05%, 1.06%, 1.07%, 1.08%, 1.09%, 1.10%, 1.25%, 1.5%, 1.75%, or 2%. The concentration of sodium phosphate dibasic in the final solution may be 0.100-0.300% with non-limiting examples including 0.100%, 0.125%, 0.150%, 0.175%, 0.200%, 0.210%, 0.211%, 0.212%, 0.213%, 0.214%, 0.215%, 0.225%, 0.250%, 0.275%, 0.300%. The concentration of sodium phosphate monobasic in the final solution may be 0.010-0.050%, with non-limiting examples of 0.010%, 0.015%, 0.020%, 0.021%, 0.022%, 0.023%, 0.024%, 0.025%, 0.026%, 0.027%, 0.028%, 0.029%, 0.030%, 0.035%, 0.040%, 0.045%, or 0.050%. The concentration of poloxamer 188 (pluronic acid (F-68)) may be 0.0001%-1%. As non-limiting examples, the concentration of poloxamer 188 (pluronic acid (F-68)) may be 0.0001%, 0.0005%, 0.001%, 0.005%, 0.01%, 0.05%, 0.1%, 0.5%, or 1%. The final solution may have a pH of 6.8-7.7. Non-limiting examples for the pH of the final solution include a pH of 6.8, 6.9, 7.0, 7.1, 7.2, 7.3, 7.4, 7.5, 7.6, or 7.7.

[1679] In some embodiments, a formulation comprising an AAV particle described herein comprises a sufficient, e.g., effective amount, of AAV particles for expression of an antibody molecule, e.g., an antibody molecule that binds to tau. In some embodiments, an AAV particle comprises a genetic element encoding at least 1, 2, 3, 4, or 5 antibody molecules.

[1680] The present disclosure provides, in some embodiments, an AAV particle formulated for delivery to the central nervous system (CNS). In some embodiments, an agent that crosses the brain blood barrier may be used. For example, some cell penetrating peptides that can target molecules to the brain blood barrier endothelium may be used for formulation (e.g., Mathupala, Expert Opin Ther Pat., 2009, 19, 137-140; the content of which is incorporated herein by reference in its entirety).

### Excipients

[1681] The formulations of the disclosure can include one or more excipients, each in an amount that together increases the stability of the AAV particle, increases cell transfection or transduction by the viral particle, increases the expression of viral particle encoded protein, and/or alters the release profile of AAV particle encoded proteins. In some embodiments, a pharmaceutically acceptable excipient may be at least 95%, at least 96%, at least 97%, at least 98%, at least 99%, or 100% pure. In some embodiments, an excipient is approved for use for humans and for veterinary use. In some embodiments, an excipient may be approved by United States Food and Drug Administration. In some embodiments, an excipient may be of pharmaceutical grade. In some embodiments, an excipient may meet the standards of the United States Pharmacopoeia (USP), the European Pharmacopoeia (EP), the British Pharmacopoeia, and/or the International Pharmacopoeia.

[1682] Excipients, which, as used herein, include, but are not limited to, any and all solvents, dispersion media, diluents, or other liquid vehicles, dispersion or suspension aids, surface active agents, isotonic agents, thickening or emulsifying agents, preservatives, and the like, as suited to the particular dosage form desired. Various excipients for formulating pharmaceutical compositions and techniques for preparing the composition are known in the art (see Remington: The Science and Practice of Pharmacy, 21st Edition, A. R. Gennaro, Lippincott, Williams & Wilkins, Baltimore, MD, 2006; the contents of which are herein incorporated by reference in their entirety). The use of a conventional excipient medium may be contemplated within the scope of the present disclosure, except insofar as any conventional excipient medium may be incompatible with a substance or its derivatives, such as by producing any undesirable biological effect or otherwise interacting in a deleterious manner with any other component(s) of the pharmaceutical composition.

### Inactive Ingredients

[1683] In some embodiments, AAV formulations may comprise at least one excipient which is an inactive ingredient. As used herein, the term “inactive ingredient” refers to one or more agents that do not contribute to the activity of the pharmaceutical composition included in formulations. In some embodiments, all, none, or some of the inactive ingredients which may be used in the formulations of the present disclosure may be approved by the US Food and Drug Administration (FDA).

[1684] Formulations of AAV particles disclosed herein may include cations or anions. In some embodiments, the formulations include metal cations such as, but not limited to, Zn²⁺, Ca²⁺, Cu²⁺, Mg⁺, or combinations thereof. In some embodiments, formulations may include polymers or polynucleotides complexed with a metal cation (see, e.g., U.S. Pat. Nos. 6,265,389 and 6,555,525, the contents of each of which are herein incorporated by reference in their entirety).

### IV. Methods and Uses of the Compositions

[1685] The present disclosure provides a method for treating a disease, disorder and/or condition in a mammalian subject, including a human subject, comprising administering to the subject any of the AAV particles described herein or administering to the subject any of the described compositions, including pharmaceutical compositions, described herein.

[1686] In some embodiments, the AAV particles of the present disclosure are administered to a subject prophylactically.

[1687] In some embodiments, the AAV particles of the present disclosure are administered to a subject having at least one of the diseases described herein.

[1688] In some embodiments, the AAV particles of the present disclosure are administered to a subject to treat a disease or disorder described herein. The subject may have the disease or disorder or may be at-risk to developing the disease or disorder.

[1689] In some embodiments, the AAV particles of the present disclosure are part of an active immunization strategy to protect against diseases and disorders. In an active immunization strategy, a vaccine or AAV particles are administered to a subject to prevent an infectious disease by activating the subject's production of antibodies that can fight off invading bacteria or viruses.

[1690] In some embodiments, the AAV particles of the present disclosure are part of a passive immunization strategy. In a passive immunization strategy, antibodies against a particular infectious agent are given directly to the subject.

[1691] In some embodiments, the AAV particles of the present disclosure may be used for passive immunotherapy of tauopathy, e.g., Alzheimer Disease or Frontotemporal Dementia, as described in Liu et al, the contents of which are herein incorporated by reference in their entirety (Liu, W et al., 2016 J Neurosci 36(49):12425-12435).

[1692] In some embodiments, the AAV particles of the present disclosure may be used to treat tauopathy as described in Ising et al, the contents of which are herein incorporated by reference in their entirety (Ising, C et al., 2017 J Exp Med April 17, Epub ahead of print). Treatment with the AAV particles may result in a significant reduction in neuropathological tau species in the hippocampus.

[1693] Passive immunization by intravenous (or intraperitoneal in mice) delivery of antibody has been shown to result in substantial serum levels of antibody (Chai et al., 2011, J Biol Chem., 286, 34457-34467, the contents of which are herein incorporated by reference in their entirety) and reduced tau pathology in mouse models of tauopathy (e.g., P301L or P301S mice). However, these reductions in tau pathology are considered modest (e.g., about 34%) and require high and repeated dosing to achieve. Passive immunization strategies are thought to be limited in their ability to deliver large quantity of antibody to the brain, which may limit efficacy, and are also challenged in addressing intracellular aggregates. In some embodiments, delivery of an AAV particle comprising a viral genome encoding an anti-tau antibody molecule can be used to overcome the limitations seen with passive immunization strategies.

[1694] In some embodiments, the administration of AAV particles of the present disclosure may result in substantially higher antibody levels in the target tissue (e.g., CNS) of the subject than if anti-tau antibodies were administered by passive immunization. In some embodiments, AAV mediated delivery can result in 1.5-16 fold higher antibody levels in the brain than if delivered by passive immunization. Whilst not wishing to be bound by theory, passive immunization is thought to generate 20-40 ng of antibody per mg of protein in the brain of the subject. In some embodiments, AAV-mediated delivery results in antibody levels 2-5× above the levels seen with passive immunization. In some embodiments, AAV-mediated delivery results in antibody levels 1.5-3× above the levels seen with passive immunization. In some embodiments, AAV-mediated delivery results in antibody levels 5-10× above the levels seen with passive immunization. In some embodiments, AAV-mediated delivery results in antibody levels 8-16× above the levels seen with passive immunization. In some embodiments, the AAV particles are administered intravenously.

[1695] In some embodiments, AAV mediated delivery of anti-tau antibody molecule may be used to reduce tau seeding, prevent tau seeding and/or prevent the propagation of tau seeds in a subject. Tau may exist in both a monomeric form and in different aggregated forms. As used herein, the term “tau aggregate” refers to a molecular complex that comprises two or more tau monomers. A tau aggregate may include a nearly unlimited number of monomers bound together. For example, a tau aggregate may comprise 2, 3, 4, 5, 6, 7, 8, 9, 10 or more tau monomers. Alternatively, a tau aggregate may include 20, 30, 40, 50, 60, 70, 80, 90, 100 or more tau monomers. A tau aggregate may also include 500, 1000, 1500, 2000, 2500, 3000, 3500, 4000, 4500, 5000 or more tau monomers. The terms “fibrillar tau aggregate” and “tau fibril” may refer to forms of tau aggregates, and these terms are used interchangeably herein. A fibrillar tau aggregate is a polymeric, ordered fiber comprising tau. Tau fibrils are generally not soluble, but shorter assemblies, or oligomers, can be soluble. Tau aggregate also refers to soluble tau oligomers and protofibrils, which may act as intermediates during tau aggregation. Also included in the definition of tau aggregate is the term “tau seed”, which refers to a tau aggregate that is capable of nucleating or “seeding” intracellular tau aggregation when internalized by a cell, or when exposed to monomeric tau in vitro.

[1696] Tau seeding activity may be assessed in vitro in cellular tau models or in vivo in mouse models. Tau seeds for efficacy studies may be variant Tau fibrils such as, but not limited to, htau40, P301S, P301L, and K18. Tau seeds may also be prepared from brain lysates of subjects with Alzheimer's disease and/or with a P301S mutation. Tau seeds may also include enriched PHFs (ePHF) or immuno purified PHF (iPHF).

[1697] In vivo, the accumulation of intracellular tau amyloids defines tauopathies. In early disease stages, the disease pathology is generally localized to discrete regions of the brain, but with disease progression, pathology invariably spreads along distinct neural networks. Accumulating evidence suggests transcellular propagation of tau seeds underlies this pathology. In this model, tau are released from donor cells and enter neighboring cells, transforming native tau protein into the misfolded form via templated conformational change. AAV particles or pharmaceutical formulations containing the AAV particles of the disclosure may be administered to a subject in order to prevent, delay or reduce the progression of tau seeds through neural networks.

### Diagnostic Applications

[1698] The AAV particles of the present disclosure may be used for diagnostic purposes or as diagnostic tools for any disease or disorder. As non-limiting examples, the AAV particles of the present disclosure or the antibody molecules encoded within the viral genome therein may be used as a biomarker for disease diagnosis. As a second non-limiting example, the AAV particles of the present disclosure or the antibody molecules encoded within the viral genome therein may be used for diagnostic imaging purposes, e.g., MRI, PET, CT or ultrasound.

### Preventative Applications

[1699] The AAV particles of the present disclosure or the antibody molecules encoded by the viral genome therein may be used to prevent disease or stabilize the progression of disease. In some embodiments, the AAV particles of the present disclosure are used to as a prophylactic to prevent a disease or disorder in the future. In some embodiments, the AAV particles of the present disclosure are used to halt further progression of a disease or disorder. As a non-limiting example, the AAV particles may be used in a manner similar to that of a vaccine.

### Research Applications

[1700] The AAV particles of the present disclosure or the antibody molecules encoded by the viral genome therein may also be used as research tools. The AAV particles may be used as in any research experiment, e.g., in vivo or in vitro experiments. In a non-limiting example, the AAV particles may be used in cultured cells. The cultured cells may be derived from any origin known to one with skill in the art, and may be as non-limiting examples, derived from a stable cell line, an animal model or a human patient or control subject. In a non-limiting example, the AAV particles may be used in in vivo experiments in animal models (i.e., mouse, rat, rabbit, dog, cat, non-human primate, guinea pig, ferret, c-elegans, drosophila, zebrafish, or any other animal used for research purposes, known in the art). In another non-limiting example, the AAV particles may be used in human research experiments or human clinical trials.

### Combination Applications

[1701] The AAV particles may be used as a combination therapy with any other therapeutic molecule known in the art. The therapeutic molecule may be approved by the US Food and Drug Administration or may be in clinical trial or at the preclinical research stage. The therapeutic molecule may utilize any therapeutic modality known in the art, with non-limiting examples including gene silencing or interference (i.e., miRNA, siRNA, RNAi, shRNA), gene editing (i.e., TALEN, CRISPR/Cas9 systems, zinc finger nucleases), and gene, protein or enzyme replacement.

### Therapeutic Applications

[1702] The present disclosure additionally provides a method for treating neurological diseases and/or disorders in a mammalian subject, including a human subject, comprising administering to the subject any of the AAV particles described herein. In some cases, neurological diseases and/or disorders treated according to methods described herein include indications involving irregular expression or aggregation of tau. Such indications may include, but are not limited to Alzheimer's disease (AD), frontotemporal dementia and parkinsonism linked to chromosome 17 (FTDP-17), Frontotemporal lobar degeneration (FTLD), Frontotemporal dementia (FTD), chronic traumatic encephalopathy (CTE), Progressive Supranuclear Palsy (PSP), Down's syndrome, Pick's disease, Corticobasal degeneration (CBD), Corticobasal syndrome, Amyotrophic lateral sclerosis (ALS), Prion diseases, Creutzfeldt-Jakob disease (CJD), Multiple system atrophy, Tangle-only dementia, and Progressive subcortical gliosis.

[1703] In some embodiments, methods of treating neurological diseases and/or disorders in a subject in need thereof may comprise the steps of: (1) deriving, generating and/or selecting an anti-tau antibody molecule, or antibody-based composition; (2) producing an AAV particle with a viral genome that includes a payload region encoding the selected antibody molecule of (1); and (3) administering the AAV particle (or pharmaceutical composition thereof) to the subject.

[1704] The present disclosure provides a method for administering to a subject in need thereof, including a human subject, a therapeutically effective amount of the AAV particles to slow, stop or reverse disease progression. As a non-limiting example, disease progression may be measured by cognitive tests such as, but not limited to, the Mini-Mental State Exam (MMSE) or other similar diagnostic tool(s), known to those skilled in the art. As another non-limiting example, disease progression may be measured by change in the pathological features of the brain, CSF or other tissues of the subject, such as, but not limited to a decrease in levels of tau (either soluble or insoluble). In some embodiments, the levels of insoluble hyperphosphorylated tau are decreased. In some embodiments levels of soluble tau are decreased. In some embodiments both soluble and insoluble tau are decreased. In some embodiments, levels of insoluble hyperphosphorylated tau are increased. In some embodiments levels of soluble tau are increased. In some embodiments both insoluble and soluble tau levels are increased. In some embodiments, neurofibrillary tangles are decreased in size, number, density, or combination thereof. In another embodiment, neurofibrillary tangles are increased in size, number, density or combination thereof.

### Alzheimer's Disease

[1705] Alzheimer Disease (AD) is a debilitating neurodegenerative disease currently afflicting more than 35 million people worldwide, with that number expected to double in coming decades. Symptomatic treatments have been available for many years but these treatments do not address the underlying pathophysiology. Recent clinical trials using these and other treatments have largely failed and, to date, no known cure has been identified.

[1706] The AD brain is characterized by the presence of two forms of pathological aggregates, the extracellular plaques composed of β-amyloid (AD) and the intracellular neurofibrillary tangles (NFT) comprised of hyperphosphorylated microtubule associated protein tau. Based on early genetic findings, β-amyloid alterations were thought to initiate disease, with changes in tau considered downstream. Thus, most clinical trials have been AD-centric. Although no mutations of the tau gene have been linked to AD, such alterations have been shown to result in a family of dementias known as tauopathies, demonstrating that changes in tau can contribute to neurodegenerative processes. Tau is normally a very soluble protein known to associate with microtubules based on the extent of its phosphorylation. Hyperphosphorylation of tau depresses its binding to microtubules and microtubule assembly activity. In tauopathies, the tau becomes hyperphosphorylated, misfolds and aggregates as NFT of paired helical filaments (PHF), twisted ribbons or straight filaments. In AD, NFT pathology, rather than plaque pathology, correlates more closely with neuropathological markers such as neuronal loss, synaptic deficits, severity of disease and cognitive decline. NFT pathology marches through the brain in a stereotyped manner and animal studies suggest a trans-cellular propagation mechanism along neuronal connections.

[1707] Several approaches have been proposed for therapeutically interfering with progression of tau pathology and preventing the subsequent molecular and cellular consequences. Given that NFT are composed of a hyperphosphorylated, misfolded and aggregated form of tau, interference at each of these stages has yielded the most avidly pursued set of targets. Introducing agents that limit phosphorylation, block misfolding or prevent aggregation have all generated promising results. Passive and active immunization with late stage anti-phospho-tau antibodies in mouse models has led to dramatic decreases in tau aggregation and improvements in cognitive parameters. It has also been suggested that introduction of anti-tau antibodies can prevent the trans-neuronal spread of tau pathology.

[1708] In some embodiments, administration of AAV particles which encode an anti-tau antibody molecule described herein may be used to treat subjects suffering from AD and other tauopathies. In some cases, methods of the present disclosure may be used to treat subjects suspected of developing AD or other tauopathies.

### Frontotemporal Dementia and Parkinsonism Linked to Chromosome 17 (FTDP-17)

[1709] Although Alzheimer's disease is, in part, characterized by the presence of tau pathology, no known mutations in the tau gene have been causally linked to the disease. Mutations in the tau gene have been shown to lead to an autosomal dominantly inherited tauopathy known as frontotemporal dementia and parkinsonism linked to chromosome 17 (FTDP-17) and demonstrate that alterations in tau can lead to neurodegenerative changes in the brain. Mutations in the tau gene that lead to FTDP-17 are thought to influence splicing patterns, thereby leading to an elevated proportion of tau with four microtubule binding domains (rather than three). These molecules are considered to be more amyloidogenic, meaning they are more likely to become hyperphosphorylated and more likely to aggregate into NFT (Hutton, M. et al., 1998, Nature 393(6686):702-5). Although physically and behaviorally, FTDP-17 patients can appear quite similar to Alzheimer's disease patients, at autopsy FTDP-17 brains lack the prominent Aβ plaque pathology of an AD brain (Gotz, J. et al., 2012, British Journal of Pharmacology 165(5):1246-59). Therapeutically targeting the aggregates of tau protein may ameliorate and prevent degenerative changes in the brain and potentially lead to improved cognitive ability.

[1710] As of today, there is no treatment to prevent, slow the progression, or cure FTDP-17. Medication may be prescribed to reduce aggressive, agitated or dangerous behavior. There remains a need for therapy affecting the underlying pathophysiology, such as antibody therapies targeting tau protein.

[1711] In some embodiments, administration of AAV particles which encode an anti-tau antibody molecule described herein may be used to treat subjects suffering from FTDP-17. In some cases, methods of the present disclosure may be used to treat subjects suspected of developing FTDP-17.

### Chronic Traumatic Encephalopathy

[1712] Unlike the genetically linked tauopathies, chronic traumatic encephalopathy is a degenerative tauopathy linked to repeated head injuries. The disease was first described in boxers who behaved “punch drunk” and has since been identified primarily in athletes that play American football, ice hockey, wrestling and other contact sports. The brains of those suffering from CTE are characterized by distinctive patterns of brain atrophy accompanied by accumulation of hyperphosphorylated species of aggregated tau in NFT. In CTE, pathological changes in tau are accompanied by a number of other pathobiological processes, such as inflammation (Daneshvar, D. H. et al., 2015 Mol Cell Neurosci 66 (Pt B): 81-90). Targeting the tau aggregates may provide reprieve from the progression of the disease and may allow cognitive improvement.

[1713] As of today, there is no medical therapy to treat or cure CTE. The condition is only diagnosed after death, due to lack of in vivo techniques to identify CTE specific biomarkers. There remains a need for therapy affecting the underlying pathophysiology, such as antibody therapies targeting tau protein.

[1714] In some embodiments, administration of AAV particles which encode an anti-tau antibody molecule described herein may be used to treat subjects suffering from CTE. In some cases, methods of the present disclosure may be used to treat subjects suspected of developing CTE.

### Prion Diseases

[1715] Prion diseases, also known as transmissible spongiform encephalopathies (TSEs), are a group of rare progressive conditions affecting the nervous system. The related conditions are rare and are typically caused by mutations in the PRNP gene which enables production of the prion protein. Gene mutations lead to an abnormally structured prion protein. Alternatively, the abnormal prion may be acquired by exposure from an outside source, e.g. by consumption of beef products containing the abnormal prion protein. Abnormal prions are misfolded, causing the brain tissue to degenerate rapidly. Prion diseases include, but are not limited to, Creutzfeldt-Jakob disease (CJD), Gerstmann-Straussler-Scheinker syndrome (GSS), fatal insomnia (FFI), variably protease-sensitive prionopathy (VPSPr), and kuru. Prion diseases are rare. Approximately 350 cases of prion diseases are diagnosed in the US annually.

[1716] CJD is a degenerative brain disorder characterized by problems with muscular coordination, personality changes including mental impairment, impaired vision, involuntary muscle jerks, weakness and eventually coma. The most common categories of CJD are sporadic, hereditary due to a genetic mutation, and acquired. Sporadic CJD is the most common form affecting people with no known risk factors for the disease. The acquired form of CJD is transmitted by exposure of the brain and nervous system tissue to the prion. As an example, variant CJD (vCDJ) is linked to a bovine spongiform encephalopathy (BSE), also known as a ‘mad cow’ disease. CJD is fatal and patients typically die within one year of diagnosis.

[1717] Prion diseases are associated with an infectious agent consisting of an alternative conformational isoform of the prion protein, PrPSc. PrPSc replication is considered to occur through an induction of the infectious prion in the normal prion protein (PrPC). The replication occurs without a nucleic acid.

[1718] As of today, there is no therapy to manage or cure CJD, or other prion diseases. Typically, treatment is aimed at alleviating symptoms and increasing comfortability of the patient, e.g. with pain relievers. There remains a need for therapy affecting the underlying pathophysiology, such as antibody therapies targeting the prion protein.

[1719] In some embodiments, administration of AAV particles which encode an anti-tau antibody molecule described herein may be used to treat subjects suffering from a prion disease. In some cases, methods of the present disclosure may be used to treat subjects suspected of developing a prion disease.

### Neurodegeneration and Stroke

[1720] Neurodegenerative diseases and other diseases of the nervous system share many common features. Neurodegenerative diseases, in particular, are a group of conditions characterized by progressive loss of neuronal structure and function, ultimately leading to neuronal cell death. Neurons are the building blocks of the nervous system(s) and are generally not able to reproduce and/or be replaced, and therefore neuron damage and/or death is especially devastating. Other, non-degenerating diseases that lead to neuronal cell loss, such as stroke, have similarly debilitating outcomes. Targeting molecules that contribute to the deteriorating cell structure or function may prove beneficial generally for treatment of nervous system diseases, neurodegenerative disease and/or stroke.

[1721] Certain molecules are believed to have inhibitory effects on neurite outgrowth, contributing to the limited ability of the central nervous system to repair. Such molecules include, but are not limited to, myelin associated proteins, such as, but not limited to, RGM (Repulsive guidance molecule), NOGO (Neurite outgrowth inhibitor), NOGO receptor, MAG (myelin associated glycoprotein), and MAI (myelin associated inhibitor). In some embodiments, the vectored antibody delivery of the present disclosure is utilized to target the aforementioned antigens (e.g., neurite outgrowth inhibitors).

[1722] Many neurodegenerative diseases are associated with aggregation of misfolded proteins, including, but not limited to, alpha synuclein, tau, amyloid β, prion proteins, TDP-43, and huntingtin (see, e.g. De Genst et al., 2014, Biochim Biophys Acta; 1844(11):1907-1919, and Yu et al., 2013, Neurotherapeutics; 10(3): 459-472, references therein). The aggregation results from disease-specific conversion of soluble proteins to an insoluble, highly ordered fibrillary deposit. This conversion is thought to prevent the proper disposal or degradation of the misfolded protein, thereby leading to further aggregation. Conditions associated with alpha synuclein and tau may be referred to as “synucleinopathies” and “tauopathies”, respectively. In some embodiments, the vectored antibody delivery of the present disclosure is utilized to target the aforementioned antigens (e.g., misfolded or aggregated proteins).

[1723] In some embodiments, administration of AAV particles which encode an anti-tau antibody molecule described herein may be used to prevent, manage and/or treat tauopathies or tau associated disease.

### V. Dosing and Administration

### Administration

[1724] In some aspects, the present disclosure provides administration and/or delivery methods for vectors and viral particles, e.g., AAV particles, encoding an anti-tau antibody molecule for the prevention, treatment, or amelioration of diseases or disorders of the CNS. For example, administration of the AAV particles prevents, treats, or ameliorates tau-related disorders. Thus, robust widespread distribution of the anti-tau antibody molecule throughout the CNS and periphery is desired for maximal efficacy. Particular target tissues for administration or delivery include CNS tissues, brain tissue, and, more specifically, caudate-putamen, thalamus, superior colliculus, cortex, and corpus collosum. Particular embodiments provide administration and/or delivery of the AAV particles and AAV vector genomes described herein to caudate-putamen and/or substantia nigra. Other particular embodiments provide administration and/or delivery of the AAV particles and AAV vector genomes described herein to thalamus.

[1725] The AAV particles of the present disclosure may be administered by any route which results in a therapeutically effective outcome. These include, but are not limited to, enteral (into the intestine), gastroenteral, epidural (into the dura matter), oral (by way of the mouth), transdermal, peridural, intracerebral (into the cerebrum), intracerebroventricular (into the cerebral ventricles), intracranial (into the skull), picutaneous (application onto the skin), intradermal, (into the skin itself), subcutaneous (under the skin), nasal administration (through the nose), intravenous (into a vein), intravenous bolus, intravenous drip, intraarterial (into an artery), intramuscular (into a muscle), intracardiac (into the heart), intraosseous infusion (into the bone marrow), intraparenchymal (into the substance of), intrathecal (into the spinal canal), intraperitoneal, (infusion or injection into the peritoneum), intravesicular infusion, intravitreal, (through the eye), intracavernous injection (into a pathologic cavity) intracavitary (into the base of the penis), intravaginal administration, intrauterine, extra-amniotic administration, transdermal (diffusion through the intact skin for systemic distribution), transmucosal (diffusion through a mucous membrane), transvaginal, insufflation (snorting), sublingual, sublabial, enema, eye drops (onto the conjunctiva), in ear drops, auricular (in or by way of the ear), buccal (directed toward the cheek), conjunctival, cutaneous, dental (to a tooth or teeth), electro-osmosis, endocervical, endosinusial, endotracheal, extracorporeal, hemodialysis, infiltration, interstitial, intra-abdominal, intra-amniotic, intra-articular, intrabiliary, intrabronchial, intrabursal, intracartilaginous (within a cartilage), intracaudal (within the cauda equine), intracisternal (within the cisterna magna cerebellomedularis), intracorneal (within the cornea), dental intracoronal, intracoronary (within the coronary arteries), intracorporus cavernosum (within the dilatable spaces of the corporus cavernosa of the penis), intradiscal (within a disc), intraductal (within a duct of a gland), intraduodenal (within the duodenum), intradural (within or beneath the dura), intraepidermal (to the epidermis), intraesophageal (to the esophagus), intragastric (within the stomach), intragingival (within the gingivae), intraileal (within the distal portion of the small intestine), intralesional (within or introduced directly to a localized lesion), intraluminal (within a lumen of a tube), intralymphatic (within the lymph), intramedullary (within the marrow cavity of a bone), intrameningeal (within the meninges), intraocular (within the eye), intraovarian (within the ovary), intrapericardial (within the pericardium), intrapleural (within the pleura), intraprostatic (within the prostate gland), intrapulmonary (within the lungs or its bronchi), intrasinal (within the nasal or periorbital sinuses), intraspinal (within the vertebral column), intrasynovial (within the synovial cavity of a joint), intratendinous (within a tendon), intratesticular (within the testicle), intrathecal (within the cerebrospinal fluid at any level of the cerebrospinal axis), intrathoracic (within the thorax), intratubular (within the tubules of an organ), intratumor (within a tumor), intratympanic (within the aurus media), intravascular (within a vessel or vessels), intraventricular (within a ventricle), iontophoresis (by means of electric current where ions of soluble salts migrate into the tissues of the body), irrigation (to bathe or flush open wounds or body cavities), laryngeal (directly upon the larynx), nasogastric (through the nose and into the stomach), occlusive dressing technique (topical route administration which is then covered by a dressing which occludes the area), ophthalmic (to the external eye), oropharyngeal (directly to the mouth and pharynx), parenteral, percutaneous, periarticular, peridural, perineural, periodontal, rectal, respiratory (within the respiratory tract by inhaling orally or nasally for local or systemic effect), retrobulbar (behind the pons or behind the eyeball), soft tissue, subarachnoid, subconjunctival, submucosal, subpial, topical, transplacental (through or across the placenta), transtracheal (through the wall of the trachea), transtympanic (across or through the tympanic cavity), ureteral (to the ureter), urethral (to the urethra), vaginal, caudal block, diagnostic, nerve block, biliary perfusion, cardiac perfusion, photopheresis or spinal.

[1726] In some embodiments, AAV particles of the present disclosure are administered so as to be delivered to a target cell or tissue. Delivery to a target cell results in anti-tau antibody molecule expression. A target cell may be a CNS cell. Non-limiting examples of such cells and/or tissues include, dorsal root ganglia and dorsal columns, proprioceptive sensory neurons, Clark's column, gracile and cuneate nuclei, cerebellar dentate nucleus, corticospinal tracts and the cells comprising the same, Betz cells, and cells of the heart.

[1727] In some embodiments, compositions may be administered in a way that allows them to cross the blood-brain barrier, vascular barrier, or other epithelial barrier.

[1728] In some embodiments, delivery of an anti-tau antibody molecule by adeno-associated virus (AAV) particles to cells of the central nervous system (e.g., parenchyma) comprises infusion into cerebrospinal fluid (CSF). CSF is produced by specialized ependymal cells that comprise the choroid plexus located in the ventricles of the brain. CSF produced within the brain then circulates and surrounds the central nervous system including the brain and spinal cord. CSF continually circulates around the central nervous system, including the ventricles of the brain and subarachnoid space that surrounds both the brain and spinal cord, while maintaining a homeostatic balance of production and reabsorption into the vascular system. The entire volume of CSF is replaced approximately four to six times per day or approximately once every four hours, though values for individuals may vary.

[1729] In some embodiments, the AAV particles may be delivered by systemic delivery. In some embodiments, the systemic delivery may be by intravascular administration. In some embodiments, the systemic delivery may be by intravenous (IV) administration.

[1730] In some embodiments, the AAV particles may be delivered by intravenous delivery.

[1731] In some embodiments, the AAV particle is administered to the subject via focused ultrasound (FUS), e.g., coupled with the intravenous administration of microbubbles (FUS-MB), or MRI-guided FUS coupled with intravenous administration, e.g., as described in Terstappen et al. (Nat Rev Drug Discovery, https://doi.org/10.1038/s41573-021-00139-y (2021)), Burgess et al. (Expert Rev Neurother. 15(5): 477-491 (2015)), and/or Hsu et al. (PLOS One 8(2): 1-8), the contents of which are incorporated herein by reference in its entirety.

[1732] In some embodiments, the AAV particles may be delivered by injection into the CSF pathway. Non-limiting examples of delivery to the CSF pathway include intrathecal and intracerebroventricular administration.

[1733] In some embodiments, the AAV particles may be delivered by thalamic delivery.

[1734] In some embodiments, the AAV particles may be delivered by intracerebral delivery.

[1735] In some embodiments, the AAV particles may be delivered by intracardiac delivery.

[1736] In some embodiments, the AAV particles may be delivered by intracranial delivery.

[1737] In some embodiments, the AAV particles may be delivered by intra cisterna magna (ICM) delivery.

[1738] In some embodiments, the AAV particles may be delivered by direct (intraparenchymal) injection into an organ (e.g., CNS (brain or spinal cord)). In some embodiments, the intraparenchymal delivery may be to any region of the brain or CNS.

[1739] In some embodiments, the AAV particles may be delivered by intrastriatal injection.

[1740] In some embodiments, the AAV particles may be delivered into the putamen.

[1741] In some embodiments, the AAV particles may be delivered into the spinal cord.

[1742] In some embodiments, the AAV particles of the present disclosure may be administered to the ventricles of the brain.

[1743] In some embodiments, the AAV particles of the present disclosure may be administered to the ventricles of the brain by intracerebroventricular delivery.

[1744] In some embodiments, the AAV particles of the present disclosure may be administered by intramuscular delivery.

[1745] In some embodiments, the AAV particles of the present disclosure are administered by more than one route described above. As a non-limiting example, the AAV particles may be administered by intravenous delivery and thalamic delivery.

[1746] In some embodiments, the AAV particles of the present disclosure are administered by more than one route described above. As a non-limiting example, the AAV particles may be administered by intravenous delivery and intracerebral delivery.

[1747] In some embodiments, the AAV particles of the present disclosure are administered by more than one route described above. As a non-limiting example, the AAV particles may be administered by intravenous delivery and intracranial delivery.

[1748] In some embodiments, the AAV particles of the present disclosure are administered by more than one route described above. In some embodiments, the AAV particles of the present disclosure may be delivered by intrathecal and intracerebroventricular administration.

[1749] In some embodiments, the AAV particles may be delivered to a subject to improve and/or correct mitochondrial dysfunction.

[1750] In some embodiments, the AAV particles may be delivered to a subject to preserve neurons. The neurons may be primary and/or secondary sensory neurons. In some embodiments, AAV particles are delivered to dorsal root ganglia and/or neurons thereof.

[1751] In some embodiments, administration of the AAV particles may preserve and/or correct function in the sensory pathways.

[1752] In some embodiments, the AAV particles may be delivered via intravenous (IV), intracerebroventricular (ICV), intraparenchymal, and/or intrathecal (IT) infusion and the therapeutic agent may also be delivered to a subject via intramuscular (IM) limb infusion in order to deliver the therapeutic agent to the skeletal muscle. Delivery of AAVs by intravascular limb infusion is described by Gruntman and Flotte, Human Gene Therapy Clinical Development, 2015, 26(3), 159-164, the contents of which are herein incorporated by reference in their entirety.

[1753] In some embodiments, delivery of viral vector pharmaceutical compositions in accordance with the present disclosure to cells of the central nervous system (e.g., parenchyma) comprises a rate of delivery defined by VG/hour=mL/hour*VG/mL, wherein VG is viral genomes, VG/mL is composition concentration, and mL/hour is rate of infusion.

[1754] In some embodiments, delivery of AAV particle pharmaceutical compositions in accordance with the present disclosure to cells of the central nervous system (e.g., parenchyma) comprises infusion of up to 1 mL. In some embodiments, delivery of viral vector pharmaceutical compositions in accordance with the present disclosure to cells of the central nervous system (e.g., parenchyma) may comprise infusion of 0.0001, 0.0002, 0.001, 0.002, 0.003, 0.004, 0.005, 0.008, 0.010, 0.015, 0.020, 0.025, 0.030, 0.040, 0.050, 0.060, 0.070, 0.080, 0.090, 0.1, 0.2, 0.3, 0.4, 0.5, 0.6, 0.7, 0.8, or 0.9 mL.

[1755] In some embodiments, delivery of AAV particle pharmaceutical compositions in accordance with the present disclosure to cells of the central nervous system (e.g., parenchyma) comprises infusion of between about 1 mL to about 120 mL. In some embodiments, delivery of viral vector pharmaceutical compositions in accordance with the present disclosure to cells of the central nervous system (e.g., parenchyma) may comprise an infusion of 0.1, 1, 1.1, 1.2, 1.3, 1.4, 1.5, 1.6, 1.7, 1.8, 1.9, 2, 3, 4, 5, 6, 7, 8, 9, 10, 11, 12, 13, 14, 15, 16, 17, 18, 19, 20, 21, 22, 23, 24, 25, 26, 27, 28, 29, 30, 31, 32, 33, 34, 35, 36, 37, 38, 39, 40, 41, 42, 43, 44, 45, 46, 47, 48, 49, 50, 51, 52, 53, 54, 55, 56, 57, 58, 59, 60, 61, 62, 63, 64, 65, 66, 67, 68, 69, 70, 71, 72, 73, 74, 75, 76, 77, 78, 79, 80, 81, 82, 83, 84, 85, 86, 87, 88, 89, 90, 91, 92, 93, 94, 95, 96, 97, 98, 99, 100, 101, 102, 103, 104, 105, 106, 107, 108, 109, 110, 111, 112, 113, 114, 115, 116, 117, 118, 119, or 120 mL. In some embodiments delivery of AAV particles to cells of the central nervous system (e.g., parenchyma) comprises infusion of at least 3 mL. In some embodiments, delivery of AAV particles to cells of the central nervous system (e.g., parenchyma) consists of infusion of 3 mL. In some embodiments, delivery of AAV particles to cells of the central nervous system (e.g., parenchyma) comprises infusion of at least 10 mL. In some embodiments, delivery of AAV particles to cells of the central nervous system (e.g., parenchyma) consists of infusion of 10 mL.

[1756] In some embodiments, the volume of the AAV particle pharmaceutical composition delivered to the cells of the central nervous system (e.g., parenchyma) of a subject is 2 μl, 20 μl, 50 μl, 80 μl, 100 μl, 200 μl, 300 μl, 400 μl, 500 μl, 600 μl, 700 μl, 800 μl, 900 μl, 1000 μl, 1100 μl, 1200 μl, 1300 μl, 1400 μl, 1500 μl, 1600 μl, 1700 μl, 1800 μl, 1900 μl, 2000 μl, or more than 2000 μl.

[1757] In some embodiments, the volume of the AAV particle pharmaceutical composition delivered to a region in both hemispheres of a subject brain is 2 μl, 20 μl, 50 μl, 80 μl, 100 μl, 200 μl, 300 μl, 400 μl, 500 μl, 600 μl, 700 μl, 800 μl, 900 μl, 1000 μl, 1100 μl, 1200 μl, 1300 μl, 1400 μl, 1500 μl, 1600 μl, 1700 μl, 1800 μl, 1900 μl, 2000 μl, or more than 2000 μl. In some embodiments, the volume delivered to a region in both hemispheres is 200 μl. As another non-limiting example, the volume delivered to a region in both hemispheres is 900 μl. As yet another non-limiting example, the volume delivered to a region in both hemispheres is 1800 μl.

[1758] In certain embodiments, AAV particle or viral vector pharmaceutical compositions in accordance with the present disclosure may be administered at about 10 to about 600 μl/site, about 50 to about 500 μl/site, about 100 to about 400 μl/site, about 120 to about 300 μl/site, about 140 to about 200 μl/site, or about 160 μl/site.

[1759] In some embodiments, the total volume delivered to a subject may be split between one or more administration sites e.g., 1, 2, 3, 4, 5, or more than 5 sites. In some embodiments, the total volume is split between administration to the left and right hemisphere.

### Delivery of AAV Particles

[1760] In some embodiments, the AAV particles or pharmaceutical compositions of the present disclosure may be administered or delivered using the methods for treatment of disease described in U.S. Pat. No. 8,999,948, or International Publication No. WO2014178863, the contents of which are herein incorporated by reference in their entirety.

[1761] In some embodiments, the AAV particles or pharmaceutical compositions of the present disclosure may be administered or delivered using the methods for delivering gene therapy in Alzheimer's Disease or other neurodegenerative conditions as described in US Application No. 20150126590, the contents of which are herein incorporated by reference in their entirety.

[1762] In some embodiments, the AAV particles or pharmaceutical compositions of the present disclosure may be administered or delivered using the methods for delivery of a CNS gene therapy as described in U.S. Pat. Nos. 6,436,708, and 8,946,152, and International Publication No. WO2015168666, the contents of which are herein incorporated by reference in their entirety.

[1763] In some embodiments, the AAV particles of the present disclosure may be administered or delivered using the methods for the delivery of AAV virions described in European Patent Application No. EP1857552, the contents of which are herein incorporated by reference in their entirety.

[1764] In some embodiments, the AAV particle or pharmaceutical compositions of the present disclosure may be administered or delivered using the methods for delivering proteins using AAV vectors described in European Patent Application No. EP2678433, the contents of which are herein incorporated by reference in their entirety.

[1765] In some embodiments, the viral vector encoding an anti-tau antibody molecule may be administered or delivered using the methods for delivering DNA molecules using AAV vectors described in U.S. Pat. No. 5,858,351, the contents of which are herein incorporated by reference in their entirety.

[1766] In some embodiments, the AAV particle or pharmaceutical compositions of the present disclosure may be administered or delivered using the methods for delivering DNA to the bloodstream described in U.S. Pat. No. 6,211,163, the contents of which are herein incorporated by reference in their entirety.

[1767] In some embodiments, the viral vector encoding an anti-tau antibody molecule may be administered or delivered using the methods for delivering AAV virions described in U.S. Pat. No. 6,325,998, the contents of which are herein incorporated by reference in their entirety.

[1768] In some embodiments, the viral vector encoding an anti-tau antibody molecule may be administered or delivered using the methods for delivering DNA to muscle cells described in U.S. Pat. No. 6,335,011, the contents of which are herein incorporated by reference in their entirety.

[1769] In some embodiments, the viral vector encoding an anti-tau antibody molecule may be administered or delivered using the methods for delivering DNA to muscle cells and tissues described in U.S. Pat. No. 6,610,290, the contents of which are herein incorporated by reference in their entirety.

[1770] In some embodiments, the viral vector encoding an anti-tau antibody molecule may be administered or delivered using the methods for delivering DNA to muscle cells described in U.S. Pat. No. 7,704,492, the contents of which are herein incorporated by reference in their entirety.

[1771] In some embodiments, the viral vector encoding an anti-tau antibody molecule may be administered or delivered using the methods for delivering a payload to skeletal muscles described in U.S. Pat. No. 7,112,321, the contents of which are herein incorporated by reference in their entirety.

[1772] In some embodiments, the AAV particle or pharmaceutical compositions of the present disclosure may be administered or delivered using the methods for delivering a payload to the central nervous system described in U.S. Pat. No. 7,588,757, the contents of which are herein incorporated by reference in their entirety.

[1773] In some embodiments, the AAV particle or pharmaceutical compositions of the present disclosure may be administered or delivered using the methods for delivering a payload described in U.S. Pat. No. 8,283,151, the contents of which are herein incorporated by reference in their entirety.

[1774] In some embodiments, the AAV particle or pharmaceutical compositions of the present disclosure may be administered or delivered using the methods for delivering a payload for the treatment of Alzheimer disease described in U.S. Pat. No. 8,318,687, the contents of which are herein incorporated by reference in their entirety.

[1775] In some embodiments, the AAV particle or pharmaceutical compositions of the present disclosure may be administered or delivered using the methods for delivering a payload described in International Patent Publication No. WO2012144446, the contents of which are herein incorporated by reference in their entirety.

[1776] In some embodiments, the AAV particle or pharmaceutical compositions of the present disclosure may be administered or delivered using the methods for delivering a payload using a glutamic acid decarboxylase (GAD) delivery vector described in International Patent Publication No. WO2001089583, the contents of which are herein incorporated by reference in their entirety.

[1777] In some embodiments, the AAV particle or pharmaceutical compositions of the present disclosure may be administered or delivered using the methods for delivering a payload to neural cells described in International Patent Publication No. WO2012057363, the contents of which are herein incorporated by reference in their entirety.

[1778] In some embodiments, the AAV particle or pharmaceutical compositions of the present disclosure may be administered or delivered using the methods for delivering a payload described in International Patent Publication No. WO2001096587, the contents of which are herein incorporated by reference in their entirety.

[1779] In some embodiments, the AAV particle or pharmaceutical compositions of the present disclosure may be administered or delivered using the methods for delivering a payload to muscle tissue described in International Patent Publication No. WO2002014487, the contents of which are herein incorporated by reference in their entirety.

[1780] In some embodiments, a catheter may be used to administer the AAV particles. In certain embodiments, the catheter or cannula may be located at more than one site in the spine for multi-site delivery. The viral particles encoding may be delivered in a continuous and/or bolus infusion. Each site of delivery may be a different dosing regimen or the same dosing regimen may be used for each site of delivery. In some embodiments, the sites of delivery may be in the cervical and the lumbar region. In some embodiments, the sites of delivery may be in the cervical region. In some embodiments, the sites of delivery may be in the lumbar region.

[1781] In some embodiments, a subject may be analyzed for spinal anatomy and pathology prior to delivery of the AAV particles described herein. As a non-limiting example, a subject with scoliosis may have a different dosing regimen and/or catheter location compared to a subject without scoliosis.

[1782] In some embodiments, the delivery method and duration is chosen to provide broad transduction in the spinal cord. In some embodiments, intrathecal delivery is used to provide broad transduction along the rostral-caudal length of the spinal cord. In some embodiments, multi-site infusions provide a more uniform transduction along the rostral-caudal length of the spinal cord.

### Delivery to Cells

[1783] In some aspects, the present disclosure provides a method of delivering to a cell or tissue any of the above-described AAV particles, comprising contacting the cell or tissue with said AAV particle or contacting the cell or tissue with a formulation comprising said AAV particle, or contacting the cell or tissue with any of the described compositions, including pharmaceutical compositions. The method of delivering the AAV particle to a cell or tissue can be accomplished in vitro, ex vivo, or in vivo.

### Delivery to Subjects

[1784] In some aspects, the present disclosure additionally provides a method of delivering to a subject, including a mammalian subject, any of the above-described AAV particles comprising administering to the subject said AAV particle, or administering to the subject a formulation comprising said AAV particle, or administering to the subject any of the described compositions, including pharmaceutical compositions.

[1785] In some embodiments, the AAV particles may be delivered to bypass anatomical blockages such as, but not limited to the blood brain barrier.

[1786] In some embodiments, the AAV particles may be formulated and delivered to a subject by a route which increases the speed of drug effect as compared to oral delivery.

[1787] In some embodiments, the AAV particles may be delivered by a method to provide uniform transduction of the spinal cord and dorsal root ganglion (DRG). In some embodiments, the AAV particles may be delivered using intrathecal infusion.

[1788] In some embodiments, a subject may be administered the AAV particles described herein using a bolus infusion. As used herein, a “bolus infusion” means a single and rapid infusion of a substance or composition.

[1789] In some embodiments, the AAV particles encoding an anti-tau antibody molecule may be delivered in a continuous and/or bolus infusion. Each site of delivery may be a different dosing regimen or the same dosing regimen may be used for each site of delivery. As a non-limiting example, the sites of delivery may be in the cervical and the lumbar region. As another non-limiting example, the sites of delivery may be in the cervical region. As another non-limiting example, the sites of delivery may be in the lumbar region.

[1790] In some embodiments, the AAV particles may be delivered to a subject via a single route administration.

[1791] In some embodiments, the AAV particles may be delivered to a subject via a multi-site route of administration. For example, a subject may be administered the AAV particles at 2, 3, 4, 5, or more than 5 sites.

[1792] In some embodiments, a subject may be administered the AAV particles described herein using sustained delivery over a period of minutes, hours or days. The infusion rate may be changed depending on the subject, distribution, formulation or another delivery parameter known to those in the art.

[1793] In some embodiments, if continuous delivery (continuous infusion) of the AAV particles is used, the continuous infusion may be for 1 hour, 2, hours, 3 hours, 4 hours, 5 hours, 6 hours, 7 hours, 8 hours, 9 hours, 10 hours, 11 hours, 12 hours, 13 hours, 14 hours, 15 hours, 16 hours, 17 hours, 18 hours, 19 hours, 20 hours, 21 hours, 22 hours, 23 hours, 24 hours, or more than 24 hours.

[1794] In some embodiments, the intracranial pressure may be evaluated prior to administration. The route, volume, AAV particle concentration, infusion duration and/or vector titer may be optimized based on the intracranial pressure of a subject.

[1795] In some embodiments, the AAV particles may be delivered by systemic delivery. In some embodiments, the systemic delivery may be by intravascular administration.

[1796] In some embodiments, the AAV particles may be delivered by injection into the CSF pathway. Non-limiting examples of delivery to the CSF pathway include intrathecal and intracerebroventricular administration.

[1797] In some embodiments, the AAV particles may be delivered by direct (intraparenchymal) injection into the substance of an organ, e.g., one or more regions of the brain.

[1798] In some embodiments, the AAV particles may be delivered by subpial injection into the spinal cord. For example, subjects may be placed into a spinal immobilization apparatus. A dorsal laminectomy may be performed to expose the spinal cord. Guiding tubes and XYZ manipulators may be used to assist catheter placement. Subpial catheters may be placed into the subpial space by advancing the catheter from the guiding tube and AAV particles may be injected through the catheter (Miyanohara et al., Mol Ther Methods Clin Dev. 2016; 3: 16046). In some cases, the AAV particles may be injected into the cervical subpial space. In some cases, the AAV particles may be injected into the thoracic subpial space.

[1799] In some embodiments, the AAV particles may be delivered by direct injection to the CNS of a subject. In some embodiments, direct injection is intracerebral injection, intraparenchymal injection, intrathecal injection, intra-cisterna magna injection, or any combination thereof. In some embodiments, direct injection to the CNS of a subject comprises convection enhanced delivery (CED). In some embodiments, administration comprises peripheral injection. In some embodiments, peripheral injection is intravenous injection.

[1800] In some embodiments, the AAV particles may be delivered to a subject in order to increase anti-tau antibody molecule levels in the caudate-putamen, thalamus, superior colliculus, cortex, and/or corpus callosum.

[1801] In some embodiments, the AAV particles may be delivered to a subject in order to increase the anti-tau antibody molecule levels in the caudate, putamen, thalamus, superior colliculus, cortex, and/or corpus callosum by transducing cells in these CNS regions.

[1802] In some embodiments, delivery of AAV particles comprising a viral genome encoding an anti-tau antibody molecule described herein to neurons in the caudate-putamen, thalamus, superior colliculus, cortex, and/or corpus callosum will lead to an increased expression of an anti-tau antibody molecule. The increased expression may lead to improved survival and function of various cell types in these CNS regions and subsequent improvement of tau-related disorder symptoms.

[1803] In particular embodiments, the AAV particles may be delivered to a subject in order to establish widespread distribution of an anti-tau antibody molecule throughout the nervous system by administering the AAV particles to the thalamus of the subject.

### Dosing

[1804] In some aspects, the present disclosure provides methods comprising administering viral vectors and their payloads in accordance with the disclosure to a subject in need thereof. Viral vector pharmaceutical, imaging, diagnostic, or prophylactic compositions thereof, may be administered to a subject using any amount and any route of administration effective for preventing, treating, diagnosing, or imaging a disease, disorder, and/or condition. In some embodiments, the disease, disorder, and/or condition is a tau-related disorder. The exact amount required will vary from subject to subject, depending on the species, age, and general condition of the subject, the severity of the disease, the particular composition, its mode of administration, its mode of activity, and the like. Compositions in accordance with the disclosure are typically formulated in unit dosage form for ease of administration and uniformity of dosage. It will be understood, however, that the total daily usage of the compositions of the present disclosure may be decided by the attending physician within the scope of sound medical judgment. The specific therapeutically effective, prophylactically effective, or appropriate imaging dose level for any particular patient will depend upon a variety of factors including the disorder being treated and the severity of the disorder; the activity of the specific compound employed; the specific composition employed; the age, body weight, general health, sex, and diet of the patient; the time of administration, route of administration, and rate of excretion of the specific peptide(s) employed; the duration of the treatment; drugs used in combination or coincidental with the specific compound employed; and like factors well known in the medical arts.

[1805] In certain embodiments, AAV particle pharmaceutical compositions in accordance with the present disclosure may be administered at dosage levels sufficient to deliver an anti-tau antibody molecule from about 0.0001 mg/kg to about 100 mg/kg, from about 0.001 mg/kg to about 0.05 mg/kg, from about 0.005 mg/kg to about 0.05 mg/kg, from about 0.001 mg/kg to about 0.005 mg/kg, from about 0.05 mg/kg to about 0.5 mg/kg, from about 0.01 mg/kg to about 50 mg/kg, from about 0.1 mg/kg to about 40 mg/kg, from about 0.5 mg/kg to about 30 mg/kg, from about 0.01 mg/kg to about 10 mg/kg, from about 0.1 mg/kg to about 10 mg/kg, or from about 1 mg/kg to about 25 mg/kg, of subject body weight per day, one or more times a day, to obtain the desired therapeutic, diagnostic, prophylactic, or imaging effect. It will be understood that the above dosing concentrations may be converted to VG or viral genomes per kg or into total viral genomes administered by one of skill in the art.

[1806] In certain embodiments, the desired dosage may be delivered using multiple administrations (e.g., two, three, four, five, six, seven, eight, nine, ten, eleven, twelve, thirteen, fourteen, or more administrations). When multiple administrations are employed, split dosing regimens such as those described herein may be used. As used herein, a “split dose” is the division of single unit dose or total daily dose into two or more doses, e.g., two or more administrations of the single unit dose. As used herein, a “single unit dose” is a dose of any therapeutic composition administered in one dose/at one time/single route/single point of contact, i.e., single administration event. In some embodiments, a single unit dose is provided as a discrete dosage form (e.g., a tablet, capsule, patch, loaded syringe, vial, etc.). As used herein, a “total daily dose” is an amount given or prescribed in 24-hour period. It may be administered as a single unit dose. The viral particles may be formulated in buffer only or in a formulation described herein.

[1807] A pharmaceutical composition described herein can be formulated into a dosage form described herein, such as a topical, intranasal, pulmonary, intratracheal, or injectable (e.g., intravenous, intraocular, intravitreal, intramuscular, intracardiac, intraperitoneal, and/or subcutaneous).

[1808] In some embodiments, delivery of the AAV particles described herein results in minimal serious adverse events (SAEs) as a result of the delivery of the AAV particles.

[1809] In some embodiments, delivery of AAV particle pharmaceutical compositions in accordance with the present disclosure to cells of the central nervous system (e.g., parenchyma) may comprise a total concentration between about 1×10⁶ VG/mL and about 1×10¹⁶ VG/mL. In some embodiments, delivery may comprise a composition concentration of about 1×10⁶, 2×10⁶, 3×10⁶, 4×10⁶, 5×10⁶, 6×10⁶, 7×10⁶, 8×10⁶, 9×10⁶, 1×10⁷, 2×10⁷, 3×10⁷, 4×10⁷, 5×10⁷, 6×10⁷, 7×10⁷, 8×10⁷, 9×10⁷, 1×10⁸, 2×10⁸, 3×10⁸, 4×10⁸, 5×10⁸, 6×10⁸, 7×10⁸, 8×10⁸, 9×10⁸, 1×10⁹, 2×10⁹, 3×10⁹, 4×10⁹, 5×10⁹, 6×10⁹, 7×10⁹, 8×10⁹, 9×10⁹, 1×10¹⁰, 2×10¹⁰, 3×10¹⁰, 4×10¹⁰, 5×10¹⁰, 6×10¹⁰, 7×10¹⁰, 8×10¹⁰, 9×10¹⁰, 1×10¹¹, 1.6×10¹¹, 1.8×10¹¹, 2×10¹¹, 3×10¹¹, 4×10¹¹, 5×10¹¹, 5.5×10¹¹, 6×10¹¹, 7×10¹¹, 8×10¹¹, 9×10¹¹, 0.8×10¹², 0.83×10¹², 1×10¹², 1.1×10¹², 1.2×10¹², 1.3×10¹², 1.4×10¹², 1.5×10¹², 1.6×10¹², 1.7×10¹², 1.8×10¹², 1.9×10¹², 2×10¹², 2.1×10², 2.2×10¹², 2.3×10¹², 2.4×10¹², 2.5×10¹², 2.6×10¹², 2.7×10¹², 2.8×10¹², 2.9×10¹², 3×10¹², 3.1×10², 3.2×10¹², 3.3×10¹², 3.4×10¹², 3.5×10¹², 3.6×10¹², 3.7×10¹², 3.8×10¹², 3.9×10¹², 4×10¹², 4.1×10², 4.2×10¹², 4.3×10¹², 4.4×10¹², 4.5×10¹², 4.6×10¹², 4.7×10¹², 4.8×10¹², 4.9×10¹², 5×10², 6×10¹², 7×10¹², 8×10¹², 9×10¹², 1×10¹³, 2×10¹³, 2.3×10¹³, 3×10¹³, 4×10¹³, 5×10¹³, 6×10¹³, 7×10¹³, 8×10¹³, 9×10¹³, 1×10¹⁴, 1.9×10¹⁴, 2×10¹⁴, 3×10¹⁴, 4×10¹⁴, 5×10¹⁴, 6×10¹⁴, 7×10¹⁴, 8×10¹⁴, 9×10¹⁴, 1×10¹⁵, 2×10¹⁵, 3×10¹⁵, 4×10¹⁵, 5×10¹⁵, 6×10¹⁵, 7×10¹⁵, 8×10¹⁵, 9×10¹⁵, or 1×10¹⁶ VG/mL.

[1810] In some embodiments, delivery of AAV particle pharmaceutical compositions in accordance with the present disclosure to cells of the central nervous system (e.g., parenchyma) may comprise a total concentration per subject between about 1×10⁶ VG and about 1×10¹⁶ VG. In some embodiments, delivery may comprise a composition concentration of about 1×10⁶, 2×10⁶, 3×10⁶, 4×10⁶, 5×10⁶, 6×10⁶, 7×10⁶, 8×10⁶, 9×10⁶, 1×10⁷, 2×10⁷, 3×10⁷, 4×10⁷, 5×10⁷, 6×10⁷, 7×10⁷, 8×10⁷, 9×10⁷, 1×10⁸, 2×10⁸, 3×10⁸, 4×10⁸, 5×10⁸, 6×10⁸, 7×10⁸, 8×10⁸, 9×10⁸, 1×10⁹, 2×10⁹, 3×10⁹, 4×10⁹, 5×10⁹, 6×10⁹, 7×10⁹, 8×10⁹, 9×10⁹, 1×10¹⁰, 2×10¹⁰, 3×10¹⁰, 4×10¹⁰, 5×10¹⁰, 6×10¹⁰, 7×10¹⁰, 8×10¹⁰, 9×10¹⁰, 1×10¹¹, 1.6×10¹¹, 2×10¹¹, 2.1×10¹¹, 2.2×10¹¹, 2.3×10¹¹, 2.4×10¹¹, 2.5×10¹¹, 2.6×10¹¹, 2.7×10¹¹, 2.8×10¹¹, 2.9×10¹¹, 3×10¹¹, 4×10¹¹, 4.6×10¹¹, 5×10¹¹, 6×10¹¹, 7×10¹¹, 7.1×10¹¹, 7.2×10¹¹, 7.3×10¹¹, 7.4×10¹¹, 7.5×10¹¹, 7.6×10¹¹, 7.7×10¹¹, 7.8×10¹¹, 7.9×10¹¹, 8×10¹¹, 9×10¹¹, 1×10¹², 1.1×10¹², 1.2×10¹², 1.3×10¹², 1.4×10¹², 1.5×10¹², 1.6×10¹², 1.7×10¹², 1.8×10¹², 1.9×10¹², 2×10¹², 2.3×10¹², 3×10¹², 4×10¹², 4.1×10², 4.2×10¹², 4.3×10¹², 4.4×10¹², 4.5×10¹², 4.6×10¹², 4.7×10¹², 4.8×10¹², 4.9×10¹², 5×10¹², 6×10¹², 7×10¹², 8×10¹², 8.1×10², 8.2×10¹², 8.3×10¹², 8.4×10¹², 8.5×10¹², 8.6×10¹², 8.7×10¹², 8.8×10¹², 8.9×10¹², 9×10¹², 1×10¹³, 2×10¹³, 3×10¹³, 4×10¹³, 5×10¹³, 6×10¹³, 7×10¹³, 8×10¹³, 9×10¹³, 1×10¹⁴, 2×10¹⁴, 3×10¹⁴, 4×10¹⁴, 5×10¹⁴, 6×10¹⁴, 7×10¹⁴, 8×10¹⁴, 9×10¹⁴, 1×10¹⁵, 2×10¹⁵, 3×10¹⁵, 4×10¹⁵, 5×10¹⁵, 6×10¹⁵, 7×10¹⁵, 8×10¹⁵, 9×10¹⁵, or 1×10¹⁶ VG/subject.

[1811] In some embodiments, delivery of AAV particles to cells of the central nervous system (e.g., parenchyma) may comprise a total dose between about 1×10⁶ VG and about 1×10¹⁶ VG. In some embodiments, delivery may comprise a total dose of about 1×10⁶, 2×10⁶, 3×10⁶, 4×10⁶, 5×10⁶, 6×10⁶, 7×10⁶, 8×10⁶, 9×10⁶, 1×10⁷, 2×10⁷, 3×10⁷, 4×10, 5×10⁷, 6×10⁷, 7×10⁷, 8×10⁷, 9×10⁷, 1×10⁸, 2×10⁸, 3×10⁸, 4×10⁸, 5×10⁸, 6×10⁸, 7×10⁸, 8×10⁸, 9×10⁸, 1×10⁹, 2×10⁹, 3×10⁹, 4×10⁹, 5×10⁹, 6×10⁹, 7×10⁹, 8×10⁹, 9×10⁹, 1×10¹⁰, 1.9×10¹⁰, 2×10¹⁰, 3×10¹⁰, 3.73×10¹⁰, 4×10¹⁰, 5×10¹⁰, 6×10¹⁰, 7×10¹⁰, 8×10¹⁰, 9×10¹⁰, 1×10¹¹, 2×10¹¹, 2.5×10¹¹, 3×10¹¹, 4×10¹¹, 5×10¹¹, 6×10¹¹, 7×10¹¹, 8×10¹¹, 9×10¹¹, 1×10¹², 2×10¹², 3×10¹², 4×10¹², 5×10¹², 6×10¹², 7×10¹², 8×10¹², 9×10¹², 1×10¹³, 2×10¹³, 3×10¹³, 4×10¹³, 5×10¹³, 6×10¹³, 7×10¹³, 8×10¹³, 9×10¹³, 1×10¹⁴, 2×10¹⁴, 3×10¹⁴, 4×10¹⁴, 5×10¹⁴, 6×10¹⁴, 7×10¹⁴, 8×10¹⁴, 9×10¹⁴, 1×10¹⁵, 2×10¹⁵, 3×10¹⁵, 4×10¹⁵, 5×10¹⁵, 6×10¹⁵, 7×10¹⁵, 8×10¹⁵, 9×10¹⁵, or 1×10¹⁶ VG.

### Combinations

[1812] The AAV particles may be used in combination with one or more other therapeutic, prophylactic, diagnostic, or imaging agents. The phrase “in combination with,” is not intended to require that the agents must be administered at the same time and/or formulated for delivery together, although these methods of delivery are within the scope of the present disclosure. Compositions can be administered concurrently with, prior to, or subsequent to, one or more other desired therapeutics or medical procedures. In general, each agent will be administered at a dose and/or on a time schedule determined for that agent. In some embodiments, the present disclosure encompasses the delivery of pharmaceutical, prophylactic, diagnostic, or imaging compositions in combination with agents that may improve their bioavailability, reduce and/or modify their metabolism, and/or modify their distribution within the body.

[1813] The therapeutic agents may be approved by the US Food and Drug Administration or may be in clinical trial or at the preclinical research stage. The therapeutic agents may utilize any therapeutic modality known in the art, with non-limiting examples including gene silencing or interference (i.e., miRNA, siRNA, RNAi, shRNA), gene editing (i.e., TALEN, CRISPR/Cas9 systems, zinc finger nucleases), and gene, protein or enzyme replacement.

### Measurement of Expression

[1814] Expression of an anti-tau antibody molecule from viral genomes may be determined using various methods known in the art such as, but not limited to immunochemistry (e.g., IHC), enzyme-linked immunosorbent assay (ELISA), affinity ELISA, ELISPOT, flow cytometry, immunocytology, surface plasmon resonance analysis, kinetic exclusion assay, liquid chromatography-mass spectrometry (LCMS), high-performance liquid chromatography (HPLC), BCA assay, immunoelectrophoresis, Western blot, SDS-PAGE, protein immunoprecipitation, PCR, and/or in situ hybridization (ISH). In some embodiments, transgenes encoding an anti-tau antibody molecule delivered in different AAV capsids may have different expression levels in different CNS tissues.

### VI. Kits and Devices

### Kits

[1815] In some aspects, the present disclosure provides a variety of kits for conveniently and/or effectively carrying out methods of the present disclosure. Typically, kits will comprise sufficient amounts and/or numbers of components to allow a user to perform multiple treatments of a subject(s) and/or to perform multiple experiments.

[1816] Any of the vectors, constructs, or anti-tau antibody molecules of the present disclosure may be comprised in a kit. In some embodiments, kits may further include reagents and/or instructions for creating and/or synthesizing compounds and/or compositions of the present disclosure. In some embodiments, kits may also include one or more buffers. In some embodiments, kits of the disclosure may include components for making protein or nucleic acid arrays or libraries and thus, may include, for example, solid supports.

[1817] In some embodiments, kit components may be packaged either in aqueous media or in lyophilized form. The container means of the kits will generally include at least one vial, test tube, flask, bottle, syringe or other container means, into which a component may be placed, and suitably aliquoted. Where there is more than one kit component, (labeling reagent and label may be packaged together), kits may also generally contain second, third or other additional containers into which additional components may be separately placed. In some embodiments, kits may also comprise second container means for containing sterile, pharmaceutically acceptable buffers and/or other diluents. In some embodiments, various combinations of components may be comprised in one or more vial. Kits of the present disclosure may also typically include means for containing compounds and/or compositions of the present disclosure, e.g., proteins, nucleic acids, and any other reagent containers in close confinement for commercial sale. Such containers may include injection or blow-molded plastic containers into which desired vials are retained.

[1818] In some embodiments, kit components are provided in one and/or more liquid solutions. In some embodiments, liquid solutions are aqueous solutions, with sterile aqueous solutions being particularly used. In some embodiments, kit components may be provided as dried powder(s). When reagents and/or components are provided as dry powders, such powders may be reconstituted by the addition of suitable volumes of solvent. In some embodiments, it is envisioned that solvents may also be provided in another container means. In some embodiments, labeling dyes are provided as dried powders. In some embodiments, it is contemplated that 10, 20, 30, 40, 50, 60, 70, 80, 90, 100, 120, 120, 130, 140, 150, 160, 170, 180, 190, 200, 300, 400, 500, 600, 700, 800, 900, 1000 micrograms or at least or at most those amounts of dried dye are provided in kits of the disclosure. In such embodiments, dye may then be resuspended in any suitable solvent, such as DMSO.

[1819] In some embodiments, kits may include instructions for employing kit components as well the use of any other reagent not included in the kit. Instructions may include variations that may be implemented.

### Devices

[1820] In some embodiments, compounds and/or compositions of the present disclosure may be combined with, coated onto or embedded in a device. Devices may include, but are not limited to, dental implants, stents, bone replacements, artificial joints, valves, pacemakers and/or other implantable therapeutic device.

[1821] The present disclosure provides for devices which may incorporate viral vectors that encode one or more anti-tau antibody molecules. These devices contain in a stable formulation the viral vectors which may be immediately delivered to a subject in need thereof, such as a human patient.

[1822] Devices for administration may be employed to deliver the viral vectors encoding anti-tau antibody molecules of the present disclosure according to single, multi- or split-dosing regimens taught herein.

[1823] Method and devices known in the art for multi-administration to cells, organs and tissues are contemplated for use in conjunction with the methods and compositions disclosed herein as embodiments of the present disclosure.

### VII. Definitions

[1824] At various places in the present specification, substituents of compounds of the present disclosure are disclosed in groups or in ranges. It is specifically intended that the present disclosure include each and every individual sub-combination of the members of such groups and ranges. For example, description of a range such as from 1 to 6 should be considered to have specifically disclosed subranges such as from 1 to 3, from 1 to 4, from 1 to 5, from 2 to 4, from 2 to 6, from 3 to 6 etc., as well as individual numbers within that range, for example, 1, 2, 2.7, 3, 4, 5, 5.3, and 6. As another example, a range such as 95-99% identity, includes something with 95%, 96%, 97%, 98%, or 99% identity, and includes subranges such as 96-99%, 96-98%, 96-97%, 97-99%, 97-98%, and 98-99% identity. This applies regardless of the breadth of the range.

[1825] The following is a non-limiting list of term definitions.

[1826] A and an: As used herein, the terms “a” and “an” refers to one or to more than one (i.e., to at least one) of the grammatical object of the article. By way of example, “an element” means one element or more than one element.

[1827] About and approximately: As used herein, the terms “about” and “approximately” when referring to a measurable value such as an amount, a temporal duration, and the like, are meant to encompass variations of ±20% or in some instances ±10%, or in some instances ±5%, or in some instances ±1%, or in some instances ±0.1% from the specified value, as such variations are appropriate to perform the disclosed methods.

[1828] Adeno-associated virus: As used herein, the term “adeno-associated virus” or “AAV” refers to members of the dependovirus genus or a variant, e.g., a functional variant, thereof. In some embodiments, the AAV is wildtype, or naturally occurring. In some embodiments, the AAV is recombinant.

[1829] AAVParticle: As used herein, an “AAV particle” refers to a particle or a virion comprising an AAV capsid, e.g., an AAV capsid variant, and a polynucleotide, e.g., a viral genome or a vector genome. In some embodiments, the viral genome of the AAV particle comprises at least one payload region and at least one ITR. In some embodiments, an AAV particle of the disclosure is an AAV particle comprising an AAV capsid polypeptide, e.g., a parent capsid sequence with at least one peptide insert. In some embodiments, the AAV particle is capable of delivering a nucleic acid, e.g., a payload region, encoding a payload to cells, typically, mammalian, e.g., human, cells. In some embodiments, an AAV particle of the present disclosure may be produced recombinantly. In some embodiments, an AAV particle may be derived from any serotype, described herein or known in the art, including combinations of serotypes (e.g., “pseudotyped” AAV) or from various genomes (e.g., single stranded or self-complementary). In some embodiments, the AAV particle may be replication defective and/or targeted. In some embodiments, the AAV particle may comprises a peptide present, e.g., inserted into, the capsid to enhance tropism for a desired target tissue. It is to be understood that reference to the AAV particle of the disclosure also includes pharmaceutical compositions thereof, even if not explicitly recited.

[1830] Administered in combination: As used herein, the term “administered in combination” or “delivered in combination” or “combined administration” refers to exposure of two or more agents (e.g., AAV) administered at the same time or within an interval such that the subject is at some point in time exposed to both agents and/or such that there is an overlap in the effect of each agent on the patient. In some embodiments, at least one dose of one or more agents is administered within about 24 hours, 12 hours, 6 hours, 3 hours, 1 hour, 30 minutes, 15 minutes, 10 minutes, 5 minutes, or 1 minute of at least one dose of one or more other agents. In some embodiments, administration occurs in overlapping dosage regimens. As used herein, the term “dosage regimen” refers to a plurality of doses spaced apart in time. Such doses may occur at regular intervals or may include one or more hiatuses in administration. In some embodiments, the administration of individual doses of one or more compounds and/or compositions of the present disclosure, as described herein, are spaced sufficiently closely together such that a combinatorial (e.g., a synergistic) effect is achieved.

[1831] Amelioration: As used herein, the term “amelioration” or “ameliorating” refers to a lessening of severity of at least one indicator of a condition or disease. For example, in the context of a neurodegenerative disorder, amelioration includes the reduction or stabilization of neuron loss.

[1832] Antibody or antibody molecule: As used herein, the term “antibody” or “antibody molecule” refers to a protein comprising at least one immunoglobulin variable domain sequence. Antibodies, for example, can be polyclonal or monoclonal, multiple or single chain, or intact immunoglobulins, and may be derived from natural sources or from recombinant sources. Antibodies can be tetramers of immunoglobulin molecules. In some embodiments, an antibody molecule comprises a full length antibody, or a full length immunoglobulin chain. In some embodiments, an antibody molecule comprises an antigen binding or functional fragment of a full length antibody, or a full length immunoglobulin chain. In some embodiments, the term antibody includes functional fragments thereof. In some embodiments, constant regions of the antibodies can be altered, e.g., mutated, to modify the properties of the antibody (e.g., to increase or decrease one or more of: Fc receptor binding, antibody glycosylation, the number of cysteine residues, effector cell function, or complement function).

[1833] Antibody fragment: As used herein, the term “antibody fragment” or “fragment” (when used in the context of an antibody molecule, e.g., “antibody molecule or a fragment thereof”) refers to at least one portion of an intact antibody, or recombinant variants thereof, and refers to the antigen binding domain, for example, an antigenic determining variable region of an intact antibody, that is sufficient to confer recognition and specific binding of the antibody fragment to a target, such as an antigen. Examples of antibody fragments include, but are not limited to, Fab, Fab′, F(ab′)2, and Fv fragments, scFv antibody fragments, linear antibodies, single domain antibodies such as sdAb (either VL or VH), camelid VHH domains, and multi-specific molecules formed from antibody fragments such as a bivalent fragment comprising two or more, for example, two, Fab fragments linked by a disulfide bridge at the hinge region, or two or more, for example, two isolated CDR or other epitope binding fragments of an antibody linked. An antibody fragment can also be incorporated into single domain antibodies, maxibodies, minibodies, nanobodies, intrabodies, diabodies, triabodies, tetrabodies, v-NAR and bis-scFv (see, for example, Hollinger and Hudson, Nature Biotechnology 23:1126-1136, 2005). Antibody fragments can also be grafted into scaffolds based on polypeptides such as a fibronectin type III (Fn3) (see U.S. Pat. No. 6,703,199, which describes fibronectin polypeptide minibodies).

[1834] Antibody heavy chain or heavy chain: As used herein, the term “antibody heavy chain,” or “heavy chain” refers to the larger of the two types of polypeptide chains present in antibody molecules in their naturally occurring conformations, and which normally determines the class to which the antibody belongs.

[1835] Antibody light chain or light chain: As used herein, the term “antibody light chain,” or “light chain” refers to the smaller of the two types of polypeptide chains present in antibody molecules in their naturally occurring conformations. Kappa (κ) and lambda (λ) light chains refer to the two major antibody light chain isotypes.

[1836] Antigen binding site: As used herein, the term “antigen-binding site” refers to the part of an antibody molecule that comprises determinants that form an interface that binds to a polypeptide, or an epitope thereof. With respect to proteins (or protein mimetics), the antigen-binding site typically includes one or more loops (of at least, e.g., four amino acids or amino acid mimics) that form an interface that binds to a polypeptide. Typically, the antigen-binding site of an antibody molecule includes at least one or two CDRs and/or hypervariable loops, or more typically at least three, four, five or six CDRs and/or hypervariable loops.

[1837] Approximately: As used herein, the term “approximately” or “about,” as applied to one or more values of interest, refers to a value that is similar to a stated reference value. In certain embodiments, the term “approximately” or “about” refers to a range of values that fall within 25%, 20%, 19%, 18%, 17%, 16%, 15%, 14%, 13%, 12%, 11%, 10%, 9%, 8%, 7%, 6%, 5%, 4%, 3%, 2%, 1%, 0.5%, 0.25%, 0.1%, or less in either direction (greater than or less than) of the stated reference value unless otherwise stated or otherwise evident from the context (except where such number would exceed 100% of a possible value).

[1838] Bispecific antibody: As used herein, the term “bispecific antibody” refers to an antibody that has specificity for no more than two antigens. A bispecific antibody molecule is characterized by a first immunoglobulin variable domain sequence which has binding specificity for a first epitope and a second immunoglobulin variable domain sequence that has binding specificity for a second epitope. In some embodiments, the first and second epitopes are on the same antigen, e.g., the same protein (or subunit of a multimeric protein). In some embodiments, the first and second epitopes overlap or substantially overlap. In some embodiments, the first and second epitopes do not overlap or do not substantially overlap (e.g., a biparatopic antibody). In some embodiments, the first and second epitopes are on different antigens, e.g., different proteins (or different subunits of a multimeric protein). In some embodiments, a bispecific antibody is able to bind two different antigens simultaneously or sequentially. Methods for making bispecific antibodies are well known in the art. Various formats for combining two antibodies are also known in the art. Forms of bispecific antibodies of the invention include, but are not limited to, a diabody, a single-chain diabody, Fab dimerization (Fab-Fab), Fab-scFv, and a tandem antibody, as known to those of skill in the art.

[1839] Capsid: As used herein, the term “capsid” refers to the exterior, e.g., a protein shell, of a virus particle, e.g., an AAV particle, that is substantially (e.g., >50%, >60%, >70%, >80%, >90%, >95%, >99%, or 100%) protein. In some embodiments, the capsid is an AAV capsid comprising an AAV capsid protein described herein, e.g., a VP1, VP2, and/or VP3 polypeptide. The AAV capsid protein can be a wild-type AAV capsid protein or a variant, e.g., a structural and/or functional variant from a wild-type or a reference capsid protein, referred to herein as an “AAV capsid variant.” In some embodiments, the AAV capsid variant described herein has the ability to enclose, e.g., encapsulate, a viral genome and/or is capable of entry into a cell, e.g., a mammalian cell. In some embodiments, the AAV capsid variant described herein may have modified tropism compared to that of a wild-type AAV capsid, e.g., the corresponding wild-type capsid.

[1840] Complementarity determining region or CDR: As used herein, the terms “complementarity determining region” or “CDR,” as used herein, refer to the sequences of amino acids within antibody variable regions which confer antigen specificity and binding affinity. For example, in general, there are three CDRs in each heavy chain variable region (for example, HCDR1, HCDR2, and HCDR3) and three CDRs in each light chain variable region (LCDR1, LCDR2, and LCDR3). The precise amino acid sequence boundaries of a given CDR can be determined using any of a number of well-known schemes, including those described by Kabat et al. (1991), “Sequences of Proteins of Immunological Interest,” 5th Ed. Public Health Service, National Institutes of Health, Bethesda, MD (“Kabat” numbering scheme), Al-Lazikani et al., (1997) JMB 273,927-948 (“Chothia” numbering scheme), or a combination thereof. In a combined Kabat and Chothia numbering scheme, in some embodiments, the CDRs correspond to the amino acid residues that are part of a Kabat CDR, a Chothia CDR, or both.

[1841] Encapsulate: As used herein, the term “encapsulate” means to enclose, surround or encase. As an example, a capsid protein, e.g., an AAV capsid variant, often encapsulates a viral genome. In some embodiments, encapsulate within a capsid, e.g., an AAV capsid variant, encompasses 100% coverage by a capsid, as well as less than 100% coverage, e.g., 95%, 90%, 85%, 80%, 70%, 60% or less. For example, gaps or discontinuities may be present in the capsid so long as the viral genome is retained in the capsid, e.g., prior to entry into a cell.

[1842] Central Nervous System or CNS: As used herein, “central nervous system” or “CNS” refers to one of the two major subdivisions of the nervous system, which in vertebrates includes the brain and spinal cord. The central nervous system coordinates the activity of the entire nervous system.

[1843] Cervical Region: As used herein, “cervical region” refers to the region of the spinal cord comprising the cervical vertebrae C1, C2, C3, C4, C5, C6, C7, and C8.

[1844] Chimeric Receptor Antigen: The term “Chimeric Antigen Receptor” or alternatively a “CAR” refers to a recombinant polypeptide construct comprising at least an extracellular antigen binding domain, a transmembrane domain and a cytoplasmic signaling domain (also referred to herein as “an intracellular signaling domain”) comprising a functional signaling domain derived from a stimulatory molecule. In some embodiments, the domains in the CAR polypeptide construct are in the same polypeptide chain, for example, comprise a chimeric fusion protein. In some embodiments, the domains in the CAR polypeptide construct are not contiguous with each other, for example, are in different polypeptide chains.

[1845] CNS tissue: As used herein, “CNS tissue” or “CNS tissues” refers to the tissues of the central nervous system, which in vertebrates, include the brain and spinal cord and sub-structures thereof.

[1846] CNS structures: As used herein, “CNS structures” refers to structures of the central nervous system and sub-structures thereof. Non-limiting examples of structures in the spinal cord may include, ventral horn, dorsal horn, white matter, and nervous system pathways or nuclei within. Non-limiting examples of structures in the brain include, forebrain, midbrain, hindbrain, diencephalon, telencephalon, myelencephalon, metencephalon, mesencephalon, prosencephalon, rhombencephalon, cortices, frontal lobe, parietal lobe, temporal lobe, occipital lobe, cerebrum, thalamus, hypothalamus, tectum, tegmentum, cerebellum, pons, medulla, amygdala, hippocampus, basal ganglia, corpus callosum, pituitary gland, putamen, striatum, ventricles and sub-structures thereof.

[1847] CNS Cells: As used herein, “CNS cells” refers to cells of the central nervous system and sub-structures thereof. Non-limiting examples of CNS cells include, neurons and sub-types thereof, glia, microglia, oligodendrocytes, ependymal cells and astrocytes. Non-limiting examples of neurons include sensory neurons, motor neurons, interneurons, unipolar cells, bipolar cells, multipolar cells, pseudounipolar cells, pyramidal cells, basket cells, stellate cells, Purkinje cells, Betz cells, amacrine cells, granule cell, ovoid cell, medium aspiny neurons and large aspiny neurons.

[1848] Codon optimization: As used herein, the term “codon optimization” refers to a process of changing codons of a given gene in such a manner that the polypeptide sequence encoded by the gene remains the same while the changed codons improve the process of expression of the polypeptide sequence. For example, if the polypeptide is of a human protein sequence and expressed in E. coli, expression will often be improved if codon optimization is performed on the DNA sequence to change the human codons to codons that are more effective for expression in E. coli.

[1849] Conservative amino acid substitution: As used herein, a “conservative amino acid substitution” is one in which the amino acid residue is replaced with an amino acid residue having a similar side chain. Families of amino acid residues having similar side chains have been defined in the art. These families include amino acids with basic side chains (e.g., lysine, arginine, histidine), acidic side chains (e.g., aspartic acid, glutamic acid), uncharged polar side chains (e.g., glycine, asparagine, glutamine, serine, threonine, tyrosine, cysteine), nonpolar side chains (e.g., alanine, valine, leucine, isoleucine, proline, phenylalanine, methionine, tryptophan), beta-branched side chains (e.g., threonine, valine, isoleucine) and aromatic side chains (e.g., tyrosine, phenylalanine, tryptophan, histidine).

[1850] Conserved: As used herein, the term “conserved” refers to nucleotides or amino acid residues of polynucleotide or polypeptide sequences, respectively, that are those that occur unaltered in the same position of two or more sequences being compared. Nucleotides or amino acids that are relatively conserved are those that are conserved among more related sequences than nucleotides or amino acids appearing elsewhere in the sequences.

[1851] In some embodiments, two or more sequences are said to be “completely conserved” if they are 100% identical to one another. In some embodiments, two or more sequences are said to be “highly conserved” if they are at least 70% identical, at least 80% identical, at least 90% identical, or at least 95% identical to one another. In some embodiments, two or more sequences are said to be “highly conserved” if they are about 70% identical, about 80% identical, about 90% identical, about 95%, about 98%, or about 99% identical to one another. In some embodiments, two or more sequences are said to be “conserved” if they are at least 30% identical, at least 40% identical, at least 50% identical, at least 60% identical, at least 70% identical, at least 80% identical, at least 90% identical, or at least 95% identical to one another. In some embodiments, two or more sequences are said to be “conserved” if they are about 30% identical, about 40% identical, about 50% identical, about 60% identical, about 70% identical, about 80% identical, about 90% identical, about 95% identical, about 98% identical, or about 99% identical to one another. Conservation of sequence may apply to the entire length of an oligonucleotide or polypeptide or may apply to a portion, region or feature thereof.

[1852] In some embodiments, conserved sequences are not contiguous. Those skilled in the art are able to appreciate how to achieve alignment when gaps in contiguous alignment are present between sequences, and to align corresponding residues not withstanding insertions or deletions present.

[1853] Delivery: As used herein, “delivery” refers to the act or manner of delivering a parvovirus e.g., AAV compound, substance, entity, moiety, cargo or payload to a target. Such target may be a cell, tissue, organ, organism, or system (whether biological or production).

[1854] Delivery Agent: As used herein, “delivery agent” refers to any agent which facilitates, at least in part, the delivery of one or more substances (including, but not limited to a compounds and/or compositions of the present disclosure, e.g., viral particles or AAV vectors) to targeted cells.

[1855] Delivery route: As used herein, the term “delivery route” and the synonymous term “administration route” refers to any of the different methods for providing a therapeutic agent to a subject. Routes of administration are generally classified by the location at which the substance is applied and may also be classified based on where the target of action is. Examples include, but are not limited to: intravenous administration, subcutaneous administration, oral administration, parenteral administration, enteral administration, topical administration, sublingual administration, inhalation administration, and injection administration, or other routes of administration described herein.

[1856] Effective amount: As used herein, the term “effective amount” of an agent is that amount sufficient to effect beneficial or desired results, for example, upon single or multiple dose administration to a subject or a cell, in curing, alleviating, relieving or improving one or more symptoms of a disorder and, as such, an “effective amount” depends upon the context in which it is being applied. For example, in the context of administering an agent that treats a tau-related disorder, an effective amount of an agent is, for example, an amount sufficient to achieve treatment, as defined herein, of a tau-related disorder as compared to the response obtained without administration of the agent.

[1857] Epitope: As used herein, the term “epitope” refers to the moieties of an antigen that specifically interact with an antibody molecule. Such moieties, also referred to herein as epitopic determinants, typically comprise, or are part of, elements such as amino acid side chains or sugar side chains. An epitopic determinant can be defined by methods known in the art or disclosed herein, e.g., by crystallography or by hydrogen-deuterium exchange. At least one or some of the moieties on the antibody molecule that specifically interact with an epitopic determinant are typically located in a CDR(s). Typically, an epitope has a specific three dimensional structural characteristics. Typically, an epitope has specific charge characteristics. Some epitopes are linear epitopes while others are conformational epitopes.

[1858] Expression: As used herein, “expression” of a nucleic acid sequence refers to one or more of the following events: (1) production of an RNA template from a DNA sequence (e.g., by transcription); (2) processing of an RNA transcript (e.g., by splicing, editing, 5′ cap formation, and/or 3′ end processing); (3) translation of an RNA into a polypeptide or protein; (4) folding of a polypeptide or protein; and/or (5) post-translational modification of a polypeptide or protein.

[1859] Excipient: As used herein, the term “excipient” refers to an inactive substance that serves as the vehicle or medium for an active pharmaceutical agent or other active substance.

[1860] Formulation: As used herein, a “formulation” includes at least a compound and/or composition of the present disclosure (e.g., a vector, AAV particle, etc.) and a delivery agent.

[1861] Fragment: A “fragment,” as used herein, refers to a contiguous portion of a whole. For example, fragments of proteins may comprise polypeptides obtained by digesting full-length protein isolated from cultured cells. In some embodiments, a fragment of a protein includes at least 3, 4, 5, 6, 7, 8, 9, 10, 11, 12, 13, 14, 15, 16, 17, 18, 19, 20, 25, 30, 35, 40, 45, 50, 55, 60, 65, 70, 75, 80, 85, 90, 95, 100, 150, 200, 250 or more amino acids. A fragment may also refer to a truncation (e.g., an N-terminal and/or C-terminal truncation) of a protein or a truncation (e.g., at the 5′ and/or 3′ end) of a nucleic acid. A protein fragment may be obtained by expression of a truncated nucleic acid, such that the nucleic acid encodes a portion of the full-length protein.

[1862] Fully human: As used herein, the term “fully human” refers to an immunoglobulin, such as an antibody or antibody fragment, where the whole molecule is of human origin or consists of an amino acid sequence identical to a human form of the antibody or immunoglobulin.

[1863] Homology: As used herein, the term “homology” refers to the overall relatedness between polymeric molecules, e.g. between nucleic acid molecules (e.g. DNA molecules and/or RNA molecules) and/or between polypeptide molecules. In some embodiments, polymeric molecules are considered to be “homologous” to one another if their sequences are at least 25%, 30%, 35%, 40%, 45%, 50%, 55%, 60%, 65%, 70%, 75%, 80%, 85%, 90%, 95%, or 99% identical or similar. The term “homologous” necessarily refers to a comparison between at least two sequences (polynucleotide or polypeptide sequences). In accordance with the disclosure, two polynucleotide sequences are considered to be homologous if the polypeptides they encode are at least about 50%, 60%, 70%, 80%, 90%, 95%, or even 99% identical for at least one stretch of at least about 20 amino acids. In some embodiments, homologous polynucleotide sequences are characterized by the ability to encode a stretch of at least 4-5 uniquely specified amino acids. For polynucleotide sequences less than 60 nucleotides in length, homology is typically determined by the ability to encode a stretch of at least 4-5 uniquely specified amino acids. In accordance with the disclosure, two protein sequences are considered to be homologous if the proteins are at least about 50%, 60%, 70%, 80%, or 90% identical for at least one stretch of at least about 20 amino acids. In many embodiments, homologous protein may show a large overall degree of homology and a high degree of homology over at least one short stretch of at least 3, 4, 5, 6, 7, 8, 9, 10, 11, 12, 13, 14, 15, 16, 17, 18, 19, 20, 25, 30, 35, 40, 45, 50, or more amino acids. In many embodiments, homologous proteins share one or more characteristic sequence elements. As used herein, the term “characteristic sequence element” refers to a motif present in related proteins. In some embodiments, the presence of such motifs correlates with a particular activity (such as biological activity).

[1864] Humanized: As used herein, the term “humanized” refers to a non-human sequence of a polynucleotide or a polypeptide which has been altered to increase its similarity to a corresponding human sequence.

[1865] Identity: As used herein, the term “identity” refers to the overall relatedness between polymeric molecules, e.g., between oligonucleotide molecules (e.g. DNA molecules and/or RNA molecules) and/or between polypeptide molecules. Calculation of the percent identity of two polynucleotide sequences, for example, may be performed by aligning the two sequences for optimal comparison purposes (e.g., gaps can be introduced in one or both of a first and a second nucleic acid sequences for optimal alignment and non-identical sequences can be disregarded for comparison purposes). In certain embodiments, the length of a sequence aligned for comparison purposes is at least 30%, at least 40%, at least 50%, at least 60%, at least 70%, at least 80%, at least 90%, at least 95%, or 100% of the length of the reference sequence. The nucleotides at corresponding nucleotide positions are then compared. When a position in the first sequence is occupied by the same nucleotide as the corresponding position in the second sequence, then the molecules are identical at that position. The percent identity between the two sequences is a function of the number of identical positions shared by the sequences, taking into account the number of gaps, and the length of each gap, which needs to be introduced for optimal alignment of the two sequences. The comparison of sequences and determination of percent identity between two sequences can be accomplished using a mathematical algorithm. For example, the percent identity between two nucleotide sequences can be determined using methods such as those described in Computational Molecular Biology, Lesk, A. M., ed., Oxford University Press, New York, 1988; Biocomputing: Informatics and Genome Projects, Smith, D. W., ed., Academic Press, New York, 1993; Sequence Analysis in Molecular Biology, von Heinje, G., Academic Press, 1987; Computer Analysis of Sequence Data, Part I, Griffin, A. M., and Griffin, H. G., eds., Humana Press, New Jersey, 1994; and Sequence Analysis Primer, Gribskov, M. and Devereux, J., eds., M Stockton Press, New York, 1991; each of which is incorporated herein by reference in its entirety. For example, the percent identity between two nucleotide sequences can be determined, for example using the algorithm of Meyers and Miller (CABIOS, 1989, 4:11-17), which has been incorporated into the ALIGN program (version 2.0) using a PAM120 weight residue table, a gap length penalty of 12 and a gap penalty of 4. The percent identity between two nucleotide sequences can, alternatively, be determined using the GAP program in the GCG software package using an NWSgapdna.CMP matrix. Methods commonly employed to determine percent identity between sequences include, but are not limited to those disclosed in Carillo, H., and Lipman, D., SIAM J Applied Math., 48:1073 (1988); incorporated herein by reference in its entirety. Techniques for determining identity are codified in publicly available computer programs. Computer software to determine homology between two sequences include, but are not limited to, GCG program package, Devereux, J., et al., Nucleic Acids Research, 12(1), 387 (1984)), BLASTP, BLASTN, and FASTA Altschul, S. F. et al., J. Molecular Biol., 215, 403 (1990)).

[1866] Immunoglobulin variable domain sequence or variable domain: As used herein, an “immunoglobulin variable domain sequence” or “variable domain” refers to an amino acid sequence which can form the structure of an immunoglobulin variable domain. For example, the sequence may include all or part of the amino acid sequence of a naturally-occurring variable domain. For example, the sequence may or may not include one, two, or more N- or C-terminal amino acids, or may include other alterations that are compatible with formation of the protein structure.

[1867] Intrabody: As used herein, the term “intrabody” refers to a form of antibody that is not secreted from a cell in which it is produced, but instead targets one or more intracellular proteins. Intrabodies may be used to affect a multitude of cellular processes including, but not limited to intracellular trafficking, transcription, translation, metabolic processes, proliferative signaling, and cell division. In some embodiments, methods of the present disclosure may include intrabody-based therapies. In some such embodiments, variable domain sequences and/or CDR sequences disclosed herein may be incorporated into one or more constructs for intrabody-based therapy.

[1868] Isolated: As used herein, the term “isolated” refers to a substance or entity that is altered or removed from the natural state, e.g., altered or removed from at least some of component with which it is associated in the natural state. For example, a nucleic acid or a peptide naturally present in a living animal is not “isolated,” but the same nucleic acid or peptide partially or completely separated from the coexisting materials of its natural state is “isolated.” An isolated nucleic acid or protein can exist in substantially purified form, or can exist in a non-native environment such as, for example, a host cell. Such polynucleotides could be part of a vector and/or such polynucleotides or polypeptides could be part of a composition, and still be isolated in that such vector or composition is not part of the environment in which it is found in nature. In some embodiments, an isolated nucleic acid is recombinant, e.g., incorporated into a vector.

[1869] miR binding site series: As used herein, the “miR binding site series” or the “miR binding site” includes an RNA sequence on the RNA transcript produced by transcribing the AAV vector genome. The “miR binding site series” or the “miR binding site” also includes the DNA sequence corresponding to the RNA sequence, in that they differ only by the T in DNA and the U in RNA. The reverse complement of such DNA is the coding sequence for the RNA sequence. That is, in some embodiments, in an expression cassette containing a DNA positive strand, the miR binding site sequence is the reverse complement of the miRNA to which it binds.

[1870] Modified: As used herein, the term “modified” refers to a changed state or structure of a molecule or entity as compared with a parent or reference molecule or entity. Molecules may be modified in many ways including chemically, structurally, and functionally. In some embodiments, compounds and/or compositions of the present disclosure are modified by the introduction of non-natural amino acids, or non-natural nucleotides.

[1871] Monoclonal antibody: As used herein, the term “monoclonal antibody” or “monoclonal antibody composition” as used herein refer to a preparation of antibody molecules of single molecular composition. A monoclonal antibody composition displays a single binding specificity and affinity for a particular epitope. A monoclonal antibody can be made by hybridoma technology or by methods that do not use hybridoma technology (e.g., recombinant methods). “Humanized” forms of non-human (for example, murine) antibodies are chimeric immunoglobulins, immunoglobulin chains or fragments thereof (such as Fv, Fab, Fab′, F(ab′)2 or other antigen-binding subsequences of antibodies) which contain minimal sequence derived from non-human immunoglobulin. For the most part, humanized antibodies and antibody fragments thereof are human immunoglobulins (recipient antibody or antibody fragment) in which residues from a complementary-determining region (CDR) of the recipient are replaced by residues from a CDR of a non-human species (donor antibody) such as mouse, rat or rabbit having the desired specificity, affinity, and capacity. In some instances, Fv framework region (FR) residues of the human immunoglobulin are replaced by corresponding non-human residues. Furthermore, a humanized antibody/antibody fragment can comprise residues which are found neither in the recipient antibody nor in the imported CDR or framework sequences. These modifications can further refine and optimize antibody or antibody fragment performance. In general, the humanized antibody or antibody fragment thereof will comprise substantially all of at least one, and typically two, variable domains, in which all or substantially all of the CDR regions correspond to those of a non-human immunoglobulin and all or a significant portion of the FR regions are those of a human immunoglobulin sequence. The humanized antibody or antibody fragment can also comprise at least a portion of an immunoglobulin constant region (Fc), typically that of a human immunoglobulin. For further details, see Jones et al., Nature, 321: 522-525, 1986; Reichmann et al., Nature, 332: 323-329, 1988; Presta, Curr. Op. Struct. Biol., 2: 593-596, 1992.

[1872] Mutation: As used herein, the term “mutation” refers to a change and/or alteration. In some embodiments, mutations may be changes and/or alterations to proteins (including peptides and polypeptides) and/or nucleic acids (including polynucleic acids). In some embodiments, mutations comprise changes and/or alterations to a protein and/or nucleic acid sequence. Such changes and/or alterations may comprise the addition, substitution and or deletion of one or more amino acids (in the case of proteins and/or peptides) and/or nucleotides (in the case of nucleic acids and or polynucleic acids). In embodiments wherein mutations comprise the addition and/or substitution of amino acids and/or nucleotides, such additions and/or substitutions may comprise 1 or more amino acid and/or nucleotide residues and may include modified amino acids and/or nucleotides. One or more mutations may result in a “mutant,” “derivative,” or “variant,” e.g., of a nucleic acid sequence or polypeptide or protein sequence.

[1873] Variant: The term “variant” refers to a polypeptide or polynucleotide that has an amino acid or a nucleotide sequence that is substantially identical, e.g., having at least 70%, 75%, 80%, 85%, 90%, 95% or 99% sequence identity to a reference sequence. In some embodiments, the variant is a functional variant.

[1874] Functional Variant: The term “functional variant” refers to a polypeptide variant or a polynucleotide variant that has at least one activity of the reference sequence.

[1875] Insertional Variant: “Insertional variants” when referring to polypeptides are those with one or more amino acids inserted, e.g., immediately adjacent or subsequent, to a position in an amino acid sequence. “Immediately adjacent” or “immediately subsequent” to an amino acid means connected to either the alpha-carboxy or alpha-amino functional group of the amino acid.

[1876] Monoclonal Antibody or Monoclonal Antibody Composition: The terms “monoclonal antibody” or “monoclonal antibody composition” as used herein refer to a preparation of antibody molecules of single molecular composition. A monoclonal antibody composition displays a single binding specificity and affinity for a particular epitope. A monoclonal antibody can be made by hybridoma technology or by methods that do not use hybridoma technology (e.g., recombinant methods). “Humanized” forms of non-human (for example, murine) antibodies are chimeric immunoglobulins, immunoglobulin chains or fragments thereof (such as Fv, Fab, Fab′, F(ab′)2 or other antigen-binding subsequences of antibodies) which contain minimal sequence derived from non-human immunoglobulin. For the most part, humanized antibodies and antibody fragments thereof are human immunoglobulins (recipient antibody or antibody fragment) in which residues from a complementary-determining region (CDR) of the recipient are replaced by residues from a CDR of a non-human species (donor antibody) such as mouse, rat or rabbit having the desired specificity, affinity, and capacity. In some instances, Fv framework region (FR) residues of the human immunoglobulin are replaced by corresponding non-human residues. Furthermore, a humanized antibody/antibody fragment can comprise residues which are found neither in the recipient antibody nor in the imported CDR or framework sequences. These modifications can further refine and optimize antibody or antibody fragment performance. In general, the humanized antibody or antibody fragment thereof will comprise substantially all of at least one, and typically two, variable domains, in which all or substantially all of the CDR regions correspond to those of a non-human immunoglobulin and all or a significant portion of the FR regions are those of a human immunoglobulin sequence. The humanized antibody or antibody fragment can also comprise at least a portion of an immunoglobulin constant region (Fc), typically that of a human immunoglobulin. For further details, see Jones et al., Nature, 321: 522-525, 1986; Reichmann et al., Nature, 332: 323-329, 1988; Presta, Curr. Op. Struct. Biol., 2: 593-596, 1992.

[1877] Multibody or Multispecific Antibody: As used herein, the term ““multibody” or “multispecific antibody” refer to an antibody comprising a plurality of immunoglobulin variable domain sequences, wherein a first immunoglobulin variable domain sequence of the plurality has binding specificity for a first epitope and a second immunoglobulin variable domain sequence of the plurality has binding specificity for a second epitope. In some embodiments, the first and second epitopes are on the same antigen, e.g., the same protein (or subunit of a multimeric protein). In some embodiments, the first and second epitopes overlap or substantially overlap. In some embodiments, the first and second epitopes do not overlap or do not substantially overlap. In some embodiments, the first and second epitopes are on different antigens, e.g., different proteins (or different subunits of a multimeric protein). In some embodiments, a multispecific antibody molecule comprises a third, fourth or fifth immunoglobulin variable domain. In some embodiments, a multispecific antibody molecule is a bispecific antibody molecule, a trispecific antibody molecule, or tetraspecific antibody molecule.

[1878] Nucleic acid: As used herein, the terms “nucleic acid,” “polynucleotide,” and “oligonucleotide” refer to any nucleic acid polymers composed of either polydeoxyribonucleotides (containing 2-deoxy-D-ribose), or polyribonucleotides (containing D-ribose), or any other type of polynucleotide that is an N glycoside of a purine or pyrimidine base, or modified purine or pyrimidine bases. There is no intended distinction in length between the term “nucleic acid,” “polynucleotide,” and “oligonucleotide,” and these terms will be used interchangeably. These terms refer only to the primary structure of the molecule. Thus, these terms include double- and single-stranded DNA, as well as double- and single-stranded RNA.

[1879] Operably linked: As used herein, the phrase “operably linked” refers to a functional connection between two or more molecules, constructs, transcripts, entities, moieties or the like.

[1880] Particle: As used herein, a “particle” is a virus comprised of at least two components, a protein capsid and a polynucleotide sequence enclosed within the capsid.

[1881] Payload: As used herein, “payload” or “payload region” refers to one or more polynucleotides or polynucleotide regions encoded by or within a viral genome or an expression product of such polynucleotide or polynucleotide region, e.g., a transgene, a polynucleotide encoding a polypeptide.

[1882] Payload construct: As used herein, “payload construct” is one or more polynucleotide regions encoding or comprising a payload that is flanked on one or both sides by an inverted terminal repeat (ITR) sequence. The payload construct is a template that is replicated in a viral production cell to produce a viral genome.

[1883] Payload construct vector: As used herein, “payload construct vector” is a vector encoding or comprising a payload construct, and regulatory regions for replication and expression in bacterial cells. The payload construct vector may also comprise a component for viral expression in a viral replication cell.

[1884] Pharmaceutically acceptable: The phrase “pharmaceutically acceptable” is employed herein to refer to those compounds, materials, compositions, and/or dosage forms which are suitable for use in contact with the tissues of human beings and animals.

[1885] Pharmaceutically acceptable excipients: As used herein, the term “pharmaceutically acceptable excipient,” as used herein, refers to any ingredient other than active agents (e.g., as described herein) present in pharmaceutical compositions that can function as vehicles for suspending and/or dissolving active agents.

[1886] Pharmaceutically acceptable salts: Pharmaceutically acceptable salts of the compounds described herein are forms of the disclosed compounds wherein the acid or base moiety is in its salt form (e.g., as generated by reacting a free base group with a suitable organic acid). Examples of pharmaceutically acceptable salts include, but are not limited to, mineral or organic acid salts of basic residues such as amines; alkali or organic salts of acidic residues such as carboxylic acids; and the like. Lists of suitable salts are found in Remington's Pharmaceutical Sciences, 17^{th} ed., Mack Publishing Company, Easton, Pa., 1985, p. 1418, Pharmaceutical Salts: Properties, Selection, and Use, P. H. Stahl and C. G. Wermuth (eds.), Wiley-VCH, 2008, and Berge et al., Journal of Pharmaceutical Science, 66, 1-19 (1977), the contents of each of which are incorporated herein by reference in their entirety.

[1887] Pharmaceutical Composition: As used herein, the term “pharmaceutical composition” or pharmaceutically acceptable composition” comprises AAV polynucleotides, AAV genomes, or AAV particle and one or more pharmaceutically acceptable excipients, solvents, adjuvants, and/or the like.

[1888] Polypeptide: As used herein, “polypeptide” means a polymer of amino acid residues (natural or unnatural) linked together most often by peptide bonds. The term, as used herein, refers to proteins, polypeptides, and peptides of any size, structure, or function. In some instances, the polypeptide encoded is smaller than about 50 amino acids and the polypeptide is then termed a peptide. If the polypeptide is a peptide, it will be at least about 2, 3, 4, or at least 5 amino acid residues long. Thus, polypeptides include gene products, naturally occurring polypeptides, synthetic polypeptides, homologs, orthologs, paralogs, fragments and other equivalents, variants, and analogs of the foregoing. A polypeptide may be a single molecule or may be a multi-molecular complex such as a dimer, trimer or tetramer. They may also comprise single chain or multichain polypeptides and may be associated or linked. The term polypeptide may also apply to amino acid polymers in which one or more amino acid residues are an artificial chemical analogue of a corresponding naturally occurring amino acid.

[1889] Polypeptide variant: The term “polypeptide variant” refers to molecules which differ in their amino acid sequence from a native or reference sequence. The amino acid sequence variants may possess substitutions, deletions, and/or insertions at certain positions within the amino acid sequence, as compared to a native or reference sequence. In some embodiments, a variant comprises a sequence having at least about 50%, at least about 80%, or at least about 90%, identical (homologous) to a native or a reference sequence.

[1890] Peptide: As used herein, “peptide” is less than or equal to 50 amino acids long, e.g., about 5, 10, 15, 20, 25, 30, 35, 40, 45, or 50 amino acids long.

[1891] Preventing: As used herein, the term “preventing” refers to partially or completely delaying onset of an infection, disease, disorder and/or condition; partially or completely delaying onset of one or more symptoms, features, or clinical manifestations of a particular infection, disease, disorder, and/or condition; partially or completely delaying onset of one or more symptoms, features, or manifestations of a particular infection, disease, disorder, and/or condition; partially or completely delaying progression from an infection, a particular disease, disorder and/or condition; and/or decreasing the risk of developing pathology associated with the infection, the disease, disorder, and/or condition.

[1892] Promoter: As used herein, the term “promoter” refers to a nucleic acid site to which a polymerase enzyme will bind to initiate transcription (DNA to RNA) or reverse transcription (RNA to DNA).

[1893] Purified: As used herein, the term “purify” means to make substantially pure or clear from one or more unwanted components, material defilement, admixture or imperfection. “Purified” refers to the state of being pure. “Purification” refers to the process of making pure. As used herein, a substance is “pure” if it is substantially free of (substantially isolated from) one or more components, e.g., one or more components found in a native context.

[1894] Region: As used herein, the term “region” refers to a zone or general area. In some embodiments, when referring to a protein or protein module, a region may comprise a linear sequence of amino acids along the protein or protein module or may comprise a three dimensional area, an epitope and/or a cluster of epitopes. In some embodiments, regions comprise terminal regions. As used herein, the term “terminal region” refers to regions located at the ends or termini of a given agent. When referring to proteins, terminal regions may comprise N- and/or C-termini. N-termini refer to the end of a protein comprising an amino acid with a free amino group. C-termini refer to the end of a protein comprising an amino acid with a free carboxyl group. N- and/or C-terminal regions may comprise the N- and/or C-termini as well as surrounding amino acids. In some embodiments, N- and/or C-terminal regions comprise from about 3 amino acids to about 30 amino acids, from about 5 amino acids to about 40 amino acids, from about 10 amino acids to about 50 amino acids, from about 20 amino acids to about 100 amino acids and/or at least 100 amino acids. In some embodiments, N-terminal regions may comprise any length of amino acids that includes the N-terminus, but does not include the C-terminus. In some embodiments, C-terminal regions may comprise any length of amino acids, which include the C-terminus, but do not comprise the N-terminus.

[1895] In some embodiments, when referring to a polynucleotide, a region may comprise a linear sequence of nucleic acids along the polynucleotide or may comprise a three dimensional area, secondary structure, or tertiary structure. In some embodiments, regions comprise terminal regions. As used herein, the term “terminal region” refers to regions located at the ends or termini of a given agent. When referring to polynucleotides, terminal regions may comprise 5′ and 3′ termini. 5′ termini refer to the end of a polynucleotide comprising a nucleic acid with a free phosphate group. 3′ termini refer to the end of a polynucleotide comprising a nucleic acid with a free hydroxyl group. 5′ and 3′ regions may there for comprise the 5′ and 3′ termini as well as surrounding nucleic acids. In some embodiments, 5′ and 3′ terminal regions comprise from about 9 nucleic acids to about 90 nucleic acids, from about 15 nucleic acids to about 120 nucleic acids, from about 30 nucleic acids to about 150 nucleic acids, from about 60 nucleic acids to about 300 nucleic acids and/or at least 300 nucleic acids. In some embodiments, 5′ regions may comprise any length of nucleic acids that includes the 5′ terminus, but does not include the 3′ terminus. In some embodiments, 3′ regions may comprise any length of nucleic acids, which include the 3′ terminus, but does not comprise the 5′ terminus.

[1896] RNA or RNA molecule: As used herein, the term “RNA” or “RNA molecule” or “ribonucleic acid molecule” refers to a polymer of ribonucleotides; the term “DNA” or “DNA molecule” or “deoxyribonucleic acid molecule” refers to a polymer of deoxyribonucleotides. DNA and RNA can be synthesized naturally, e.g., by DNA replication and transcription of DNA, respectively; or be chemically synthesized. DNA and RNA can be single-stranded (i.e., ssRNA or ssDNA, respectively) or multi-stranded (e.g., double stranded, i.e., dsRNA and dsDNA, respectively). The term “mRNA” or “messenger RNA”, as used herein, refers to a single stranded RNA that encodes the amino acid sequence of one or more polypeptide chains.

[1897] Sample: As used herein, the term “sample” refers to an aliquot or portion taken from a source and/or provided for analysis or processing. In some embodiments, a sample is from a biological source such as a tissue, cell or component part (e.g. a body fluid, including but not limited to blood, mucus, lymphatic fluid, synovial fluid, cerebrospinal fluid, saliva, amniotic fluid, amniotic cord blood, urine, vaginal fluid and semen).

[1898] ScFv: As used herein, the term “scFv” refers to a fusion protein comprising at least one antibody fragment comprising a variable region of a light chain and at least one antibody fragment comprising a variable region of a heavy chain, wherein the light and heavy chain variable regions are contiguously linked via a short flexible polypeptide linker, and capable of being expressed as a single chain polypeptide, and wherein the scFv retains the specificity of the intact antibody from which it is derived. Unless specified, as used herein an scFv may have the VL and VH variable regions in either order, for example, with respect to the N-terminal and C-terminal ends of the polypeptide, the scFv may comprise VL-linker-VH or may comprise VH-linker-VL. In some embodiments, the scFv may comprise the structure of NH2-VL-linker-VH—COOH or NH2-VH-linker-VL-COOH.

[1899] Serotype: As used herein, the term “serotype” refers to distinct variations in a capsid of an AAV based on surface antigens which allow epidemiologic classifications of the AAVs at the sub-species level.

[1900] Signal Sequences: As used herein, the phrase “signal sequences” refers to a sequence which can direct the transport or localization.

[1901] Similarity: As used herein, the term “similarity” refers to the overall relatedness between polymeric molecules, e.g. between polynucleotide molecules (e.g. DNA molecules and/or RNA molecules) and/or between polypeptide molecules. Calculation of percent similarity of polymeric molecules to one another can be performed in the same manner as a calculation of percent identity, except that calculation of percent similarity takes into account conservative substitutions as is understood in the art.

[1902] Spacer: As used herein, a “spacer” is generally any selected nucleic acid sequence of, e.g., 1, 2, 3, 4, 5, 6, 7, 8, 9, or 10 nucleotides in length, which is located between two or more consecutive miR binding site sequences.

[1903] Subject: As used herein, the term “subject” or “patient” refers to any organism to which a composition in accordance with the disclosure may be administered, e.g., for experimental, diagnostic, prophylactic, and/or therapeutic purposes. Similarly, “subject” or “patient” refers to an organism who may seek, who may require, who is receiving, or who will receive treatment or who is under care by a trained professional for a particular disease or condition. Typical subjects include animals (e.g., mammals such as mice, rats, rabbits, non-human primates, and humans). In certain embodiments, a subject or patient may be susceptible to or suspected of having a tau-related disorder. In certain embodiments, a subject or patient may be diagnosed with Alzheimer's disease (AD), frontotemporal dementia and parkinsonism linked to chromosome 17 (FTDP-17), frontotemporal lobar degeneration (FTLD), frontotemporal dementia (FTD), chronic traumatic encephalopathy (CTE), progressive Supranuclear Palsy (PSP), Down's syndrome, Pick's disease, corticobasal degeneration (CBD), corticobasal syndrome, amyotrophic lateral sclerosis (ALS), prion diseases, Creutzfeldt-Jakob disease (CJD), multiple system atrophy, tangle-only dementia, or progressive subcortical gliosis.

[1904] Substantially: As used herein, the term “substantially” refers to the qualitative condition of exhibiting total or near-total extent or degree of a characteristic or property of interest. One of ordinary skill in the biological arts will understand that biological and chemical phenomena rarely, if ever, go to completion and/or proceed to completeness or achieve or avoid an absolute result. The term “substantially” is therefore used herein to capture the potential lack of completeness inherent in many biological and chemical phenomena.

[1905] Suffering from: An individual who is “suffering from” a disease, disorder, and/or condition has been diagnosed with or displays one or more symptoms of a disease, disorder, and/or condition.

[1906] Susceptible to: An individual who is “susceptible to” a disease, disorder, and/or condition has not been diagnosed with and/or may not exhibit symptoms of the disease, disorder, and/or condition but harbors a propensity to develop a disease or its symptoms. In some embodiments, an individual who is susceptible to a disease, disorder, and/or condition (for example, cancer) may be characterized by one or more of the following: (1) a genetic mutation associated with development of the disease, disorder, and/or condition; (2) a genetic polymorphism associated with development of the disease, disorder, and/or condition; (3) increased and/or decreased expression and/or activity of a protein and/or nucleic acid associated with the disease, disorder, and/or condition; (4) habits and/or lifestyles associated with development of the disease, disorder, and/or condition; (5) a family history of the disease, disorder, and/or condition; and (6) exposure to and/or infection with a microbe associated with development of the disease, disorder, and/or condition. In some embodiments, an individual who is susceptible to a disease, disorder, and/or condition will develop the disease, disorder, and/or condition. In some embodiments, an individual who is susceptible to a disease, disorder, and/or condition will not develop the disease, disorder, and/or condition.

[1907] Synthetic: The term “synthetic” means produced, prepared, and/or manufactured by the hand of man. Synthesis of polynucleotides or polypeptides or other molecules of the present disclosure may be chemical or enzymatic.

[1908] Targeting: As used herein, “targeting” means the process of design and selection of nucleic acid sequence that will hybridize to a target nucleic acid and induce a desired effect.

[1909] Targeted Cells: As used herein, “target cells” or “targeted cells” refers to any one or more cells of interest. The cells may be found in vitro, in vivo, in situ or in the tissue or organ of an organism. The organism may be an animal, a mammal, a human and/or a patient. The target cells may be CNS cells or cells in CNS tissue.

[1910] Therapeutic Agent: The term “therapeutic agent” refers to any agent that, when administered to a subject has a therapeutic, diagnostic, and/or prophylactic effect and/or elicits a desired biological and/or pharmacological effect.

[1911] Therapeutically effective amount: As used herein, the term “therapeutically effective amount” means an amount of an agent to be delivered (e.g., nucleic acid, drug, therapeutic agent, diagnostic agent, prophylactic agent, etc.) that is sufficient, when administered to a subject suffering from or susceptible to an infection, disease, disorder, and/or condition, to treat, improve symptoms of, diagnose, prevent, and/or delay the onset of the infection, disease, disorder, and/or condition. In some embodiments, a therapeutically effective amount is provided in a single dose. In some embodiments, a therapeutically effective amount is administered in a dosage regimen comprising a plurality of doses. Those skilled in the art will appreciate that in some embodiments, a unit dosage form may be considered to comprise a therapeutically effective amount of a particular agent or entity if it comprises an amount that is effective when administered as part of such a dosage regimen.

[1912] Thoracic Region: As used herein, a “thoracic region” refers to a region of the spinal cord comprising the thoracic vertebrae T1, T2, T3, T4, T5, T6, T7, T8, T9, T10, T11, and T12.

[1913] Treating: As used herein, the term “treating” refers to partially or completely alleviating, ameliorating, improving, relieving, reversing, delaying onset of, inhibiting progression of, reducing severity of, and/or reducing incidence of one or more symptoms or features of a particular infection, disease, disorder, and/or condition. Treatment may be administered to a subject who does not exhibit signs of a disease, disorder, and/or condition and/or to a subject who exhibits only early signs of a disease, disorder, and/or condition for the purpose of decreasing the risk of developing pathology associated with the disease, disorder, and/or condition.

[1914] Unmodified: As used herein, “unmodified” refers to any substance, compound or molecule prior to being changed in any way. Unmodified may, but does not always, refer to the wild-type or native form of a biomolecule or entity. Molecules or entities may undergo a series of modifications whereby each modified product may serve as the “unmodified” starting molecule or entity for a subsequent modification.

[1915] Vector: As used herein, a “vector” is any molecule or moiety which transports, transduces or otherwise acts as a carrier of a heterologous molecule. Vectors of the present disclosure may be produced recombinantly and may be based on and/or may comprise adeno-associated virus (AAV) parent or reference sequence(s). Such parent or reference AAV sequences may serve as an original, second, third or subsequent sequence for engineering vectors. In non-limiting examples, such parent or reference AAV sequences may comprise any one or more of the following sequences: a polynucleotide sequence encoding a tau binding protein (e.g., an anti-tau antibody), having a sequence that may be wild-type or modified from wild-type and which sequence may encode full-length or partial sequence of a protein, protein domain; a polynucleotide encoding an antibody, or antigen-binding portion thereof, which binds to tau and variants thereof, having a sequence that may be wild-type or modified from wild-type; and a transgene encoding an antibody, or antigen-binding portion thereof, which binds to tau and variants thereof that may or may not be modified from a wild-type sequence.

[1916] Viral construct vector. As used herein, a “viral construct vector” is a vector which comprises one or more polynucleotide regions encoding or comprising Rep and or Cap protein. A viral construct vector may also comprise one or more polynucleotide region encoding or comprising components for viral expression in a viral replication cell.

[1917] Viral genome: As used herein, a “viral genome” or “vector genome” is a polynucleotide comprising at least one inverted terminal repeat (ITR) and at least one encoded payload. A viral genome encodes at least one copy of the payload.

### EXAMPLES

### Example 1. NHP High-Throughput Screen of TRACER AAV Libraries

[1918] A TRACER based method as described in WO2020072683, the contents of which are herein incorporated by reference in their entirety, was adapted for use in non-human primates (NHP), as described in WO 2021/202651 and WO2021/230987, the contents of which are herein incorporated by reference in their entirety. An orthogonal evolution approach was combined with a high throughput screening by NGS in NHP as described in WO 2021/202651 and WO2021/230987, the contents of which are herein incorporated by reference in their entirety. Briefly, AAV9/AAV5 starting libraries, driven by synapsin or GFAP promoters were administered to non-human primate (NHP) intravenously for in vivo AAV selection (biopanning), performed iteratively. All libraries were injected intravenously at a dose of 1e14VG per animal (approximately 3e13 VG/kg). Orthogonally, biopanning was conducted in hBMVEC cells using the same starting libraries. In the second round of biopanning in NHP, only libraries driven by the synapsin promoter were used. After a period, (e.g., 1 month) RNA was extracted from nervous tissue, e.g., brain and spinal cord. Following RNA recovery and RT-PCR amplification, a systematic NGS enrichment analysis was performed, and the peptides shown in Table 20 identified. Capsid enrichment ratio, including calculating the ratio of, e.g., P2/P1 reads and comparison to a benchmark (e.g., AAV9) was evaluated.

[1919] Candidate library enrichment data in P3 NHP brain for the peptides identified, over benchmark AAV9, are shown in Table 20. Data are provided as fold enrichment. Fifty-one variants showed greater than 10-fold enrichment over AAV9. Variants with 0.0 enrichment over AAV9 are not included in Table 20.

TABLE 20
NHP NGS AAV9 Enrichment

| | | Fold | | | Fold |
|---|---|---|---|---|---|
| | | enrich- | | | enrich- |
| | | ment | | | ment |
| Peptide | SEQ | over | Peptide | SEQ | over |
| Sequence | ID | AAV9 | Sequence | ID | AAV9 |
| PLNGAVHLYA | 1139 | 473.7 | AQAGEQSTRL | 1166 | 16.1 |
| AQARDSPKGW | 1140 | 214 | AQASNDVGRA | 1167 | 15.4 |
| LTNGAVRDRP | 1141 | 134.4 | AQATFTASEY | 1168 | 15.3 |
| VQAFTHDSRG | 1142 | 88.6 | AKAHAGTIYS | 1169 | 14.9 |
| AQAYSTDVRM | 1143 | 84.8 | AQARTIDQCC | 1170 | 14.8 |
| AQAYSTDVRI | 1144 | 83.8 | AQEYNSNPKA | 1171 | 14.5 |
| AQAFTAAERM | 1145 | 74.9 | AQVVDNSTHA | 1172 | 14.5 |
| AQTHLQIGVA | 1146 | 54.6 | AQATLSVPLK | 1173 | 14.4 |
| AQSNAVLSLA | 1147 | 51.6 | AQIVMNSLKA | 1174 | 12.5 |
| AQAYSTDERM | 1148 | 41.4 | AQATMSQTMA | 1175 | 12.5 |
| AQAYSTDVRL | 1149 | 31.7 | AQALTQDERW | 1176 | 12 |
| AQATVSTLRM | 1150 | 31.5 | AQAQLSTLRP | 1177 | 11.6 |
| AQAYSTDERK | 1151 | 31.2 | AQVVMGISVA | 1178 | 11.4 |
| AQAYSTDMRM | 1152 | 30.4 | AQAYTTDVRM | 1179 | 11.4 |
| VVNGAVLHVA | 1153 | 29.8 | AQHIDSMRPP | 1180 | 11.3 |
| AQAYSTDVTM | 1154 | 29.7 | AQASTGTLRL | 1181 | 11.1 |
| AQAHLQIGVA | 1155 | 23 | AQHRALDYYA | 1182 | 11 |
| FLDPAVSSKA | 1156 | 22.6 | AQARESPRGL | 1183 | 10.9 |
| AQAYVSTLRM | 1157 | 21.9 | AQALLAGTRV | 1184 | 10.7 |
| AQAQTGPPLK | 1158 | 20.1 | TKIQAVPWNA | 1185 | 10.7 |
| EQASRLPTPG | 1159 | 20 | AQASLSSTRP | 1186 | 10.6 |
| AQASVSTMRM | 1160 | 19.7 | AQAMGSRSDQ | 1187 | 10.4 |
| TDYSAVRLGA | 1161 | 18 | AQAAQGTYRG | 1188 | 10.3 |
| TQAYSTDVRM | 1162 | 17.9 | SQENAVFSKA | 1189 | 10.3 |
| AQALPSNERL | 1163 | 17.4 | AQAYGLPKGP | 1190 | 8.4 |
| AQAYSTDVRT | 1164 | 16.4 | GGTLAVVSLA | 1191 | 6.9 |
| AQSSLPEMVA | 1165 | 16.2 | AQAYVSSVKM | 1192 | 5.2 |

[1920] A subset of the peptide variants from the NHP biopanning showed a very strong and consistent enrichment over AAV9 and PHP.B controls. Further, the peptide of SEQ ID NO: 3648 not only showed a strong enrichment over AAV9 in the brain, but also in the spinal cord, as it led to a 125.6 fold enrichment over AAV9 in the spinal cord. Following the removal of the least reliable variants, a set of 22 variants with enrichment factors ranging from 7-fold to >400-fold over AAV9 was identified. These were cross-referenced to a non-synthetic PCR-amplified library screened in parallel and 12 candidates showed reliable enrichment and high consistency in both assays. Of these, 5 candidates with the highest enrichment scores in both assays and the highest consistency across animals and tissues were retained for individual evaluation. Candidate capsids were labeled TTD-001, TTD-002, TTD-003, TTD-004 and TTD-005 as shown in Table 3.

[1921] After 3 rounds of screening of AAV9 peptide insertion library in NHP, many capsids outperformed their parental capsid AAV9 in penetration of the blood brain barrier (BBB). Some of the capsids comprising a peptide showed high enrichment scores and high consistency both across different brain tissue samples from the same animal and across different animals. Consistency in both NNK and NNM codons was also observed. 22 capsid variants exhibited enrichment factors ranging from 7-fold to >400-fold over AAV9 in the brain tissues. A majority of these variants also demonstrated high enrichment factors up to 125-fold over AAV9 in the spinal cord. Of these, 5 candidates with diverse inserted sequences were selected for further evaluation as individual capsids.

### Example 2. Individual Capsid Characterization

[1922] The goal of these experiments was to determine the transduction level and the spatial distribution of each of the 5 capsid candidates selected from the study described in Example 1 relative to AAV9 following intravascular infusion in NHPs (cynomolgus macaque). The 5 selected capsid candidates were TTD-001 (SEQ ID NO: 3623 and 3636, comprising SEQ ID NO: 3648), TTD-002 (SEQ ID NO: 3624, 3625, and 3637, comprising SEQ ID NO: 3649), TTD-003 (SEQ ID NO: 3626 and 3638, comprising SEQ ID NO: 3650), TTD-004 (SEQ ID NO: 3627 and 3639, comprising SEQ ID NO: 3651) and TTD-005 (SEQ ID NO: 3628 and 3640, comprising SEQ ID NO: 3652) as outlined in Table 3.

[1923] AAV particles were generated with each of these 5 capsids encapsulating a transgene encoding a payload fused to an HA tag (payload-HA) and driven by a full-length CMV/chicken beta actin promoter by triple transfection in HEK293T cells and formulated in a pharmaceutically acceptable solution. Each test capsid and AAV9 control were tested by intravenously providing two (2) NHP females the AAV particle formulation at a dose of 2e13 VG/kg. The in-life period was 14 days and then a battery of CNS and peripheral tissues were collected for quantification of transgene mRNA, transgene protein and viral DNA (biodistribution). Samples were also collected, fixed and paraffin embedded for immunohistochemical staining.

[1924] In a first pass screening of RNA quantification by qRT-PCR and RT-ddPCR, total RNA was extracted from 3-mm punches from various areas of the brain (cortex, striatum, hippocampus, cerebellum), spinal cord sections, liver and heart, and analyzed by qRT-PCR using a proprietary Taqman set specific for the synthetic CAG exon-exon junction. Cynomolgus TBP (TATA box-binding protein) was used as a housekeeping gene.

[1925] TRACER capsids showed an increase in RNA expression in all brain regions relative to AAV9 in at least one animal. The highest and most consistent increase in brain transduction was observed with capsids TTD-003 and TTD-004 (8- to 200-fold depending in various anatomical locations). In this initial screening TTD-001 was not assessed due to staggered animal dosing. An approximate 10- to 12-fold increase was consistently observed in whole brain slices (equivalent to an average of multiple regions), which was consistent with the values indicated in a next-generation sequencing (NGS) assay. In order to increase data robustness, droplet digital RT-PCR (ddPCR) was performed in parallel to qRT-PCR and confirmed the trends indicated by the qPCR data.

[1926] Interestingly, RNA quantification performed in the spinal cord and dorsal root ganglia indicated important differences between the capsid variants. The spinal cord transduction profile was consistent with the brain, with a strong and consistent increase with TTD-003 and TTD-004 capsids, but interestingly the DRG transduction suggested a substantial detargeting of the TTD-004 capsid, whereas the TTD-003 capsid showed a strongly increased RNA expression.

[1927] Total DNA was extracted from the same brain tissues as RNA, and biodistribution was measured by ddPCR using a Tagman set specific for the CMV promoter sequence. The RNAseP gene was used as a copy number reference. Vector genome (VG) per cell values were determined both by qPCR and ddPCR. Increased biodistribution was observed for the TTD-004 capsid in most brain regions, but surprisingly none of the other candidates showed a significant increase by comparison with AAV9. This apparent contradiction with the RNA quantification data could suggest that some capsids may present improved properties over AAV9 in post-attachment mechanisms rather than strict vector translocation in CNS parenchyma. Interestingly, DNA analysis confirmed the substantial detargeting of TTD-004 capsid from the DRG.

[1928] To further explore the behavior of capsid variant TTD-004, viral genome (VG) quantification was completed from tissues collected from heart atrium, heart ventricle, quadriceps muscle, liver (left and right) and diaphragm and compared to vector genome presence as delivered by AAV9 in the same tissues.

[1929] For TTD-003 and TTD-004 initial immunohistochemical analyses demonstrated the presence of payload-HA to a greater extent than seen with AAV9 delivery in cerebellar tissue, including in the dentate nucleus. Immunohistochemistry confirmed the de-targeting of the dorsal root ganglia for capsid variant TTD-004 as compared to TTD-003 and AAV9.

[1930] Data for each of the variants as described above were compiled as an average mRNA (fold over TBP) or DNA (VG per cell) quantification per capsid variant per tissue as shown in Table 21 below.

TABLE 21
Characterization of exemplary capsid variants

| Measure | Tissue | AAV9 | TTD-001 | TTD-002 | TTD-003 | TTD-004 | TTD-005 |
|---|---|---|---|---|---|---|---|
| mRNA | Frontal | 0.000325065 | 2.7232575 | 0.000768179 | 0.006268831 | 0.007076252 | 0.002204024 |
| | Cortex | | | | | | |
| mRNA | Sensory | 0.001486245 | 3.400055 | 0.00417739 | 0.006788644 | 0.010976612 | 0.004139604 |
| | Cortex | | | | | | |
| mRNA | Motor | 0.00063318 | 9.00819 | 0.001050247 | 0.009954825 | 0.010522399 | 0.002942249 |
| | Cortex | | | | | | |
| mRNA | Putamen | 0.000612759 | 3.557205 | 0.001395549 | 0.011832671 | 0.011476176 | 0.001150153 |
| mRNA | Thalamus | 0.002610992 | 2.863635 | 0.013937891 | 0.101411445 | 0.07565653 | 0.01100289 |
| mRNA | Cerebellar | 0.00133497 | 1.3439 | 0.008517779 | 0.006396677 | 0.012964181 | 0.004382119 |
| | Cortex | | | | | | |
| mRNA | Dentate | 0.001364954 | 0.963955 | — | — | — | — |
| | Nucleus | | | | | | |
| mRNA | Caudate | 0.000352281 | 1.3026 | — | 0.003259804 | 0.00634117 | — |
| mRNA | Hippocampus | 0.000311824 | 0.407015 | — | — | — | — |
| mRNA | SC-cervical | 0.012205449 | 11.877762 | 0.022004264 | 0.026994764 | 0.088316491 | 0.005773054 |
| mRNA | SC-Thoracic | 0.048833465 | 2.9974295 | 0.004360318 | 0.035118928 | 0.020543776 | 0.005629959 |
| mRNA | SC-Lumbar | 0.029887407 | 7.969603 | 0.056231995 | 0.016033388 | 0.047713563 | 0.026324154 |
| mRNA | DRG- | 0.74570895 | 9.274951 | 0.007897714 | 2.47872652 | 0.280868887 | 0.008122233 |
| | cervical | | | | | | |
| mRNA | DRG- | 0.5559061 | 5.22606 | 0.006456564 | 8.721845271 | 0.104701895 | — |
| | Thoracic | | | | | | |
| mRNA | DRG- | 1.089758 | 17.308436 | 0.008247771 | 2.271300217 | 0.426704698 | 0.119974244 |
| | Lumbar | | | | | | |
| mRNA | Lung | 0.004807149 | 0.000546842 | — | — | 0.013744781 | — |
| mRNA | Pancreas | 1 | — | — | — | — | — |
| mRNA | Colon | 0.017962678 | 0.005041385 | — | — | 0.183862903 | — |
| mRNA | Kidney | 0.043825993 | 0.006649157 | — | — | 0.041234576 | — |
| mRNA | Liver | 0.674478605 | 0.253188648 | — | — | 2.578654807 | — |
| mRNA | Adrenal | — | — | — | — | — | — |
| mRNA | Spleen | 0.014066875 | 0.000955981 | — | — | 0.013435626 | — |
| mRNA | Heart | 1.323389668 | 0.132477314 | — | — | 5.587929805 | — |
| mRNA | Quadriceps | 0.116623509 | — | — | — | 4.527799743 | — |
| mRNA | Diaphragm | 0.250001109 | — | — | — | 1.936435215 | — |
| DNA | Frontal | 0.07713 | 2.104843 | 0.10252 | 0.068367 | 0.380429 | 0.1257545 |
| | Cortex | | | | | | |
| DNA | Sensory | 0.093003 | 2.679886 | 0.07443 | 0.034016 | 0.2670975 | 0.132503 |
| | Cortex | | | | | | |
| DNA | Motor | 0.08796 | 4.3437625 | 0.0913085 | 0.094401 | 0.318999 | 0.1110695 |
| | Cortex | | | | | | |
| DNA | Putamen | 0.0581365 | 3.07904 | 0.12326 | 0.1497635 | 0.2731175 | 0.0715295 |
| DNA | Thalamus | 0.0524055 | 2.076863 | 0.0664225 | 0.090511 | 0.214999 | 0.086863 |
| DNA | Cerebellar | 0.014238 | 0.186361 | 0.0092915 | 0.009578 | 0.0356345 | 0.0128655 |
| | Cortex | | | | | | |
| DNA | Dentate | 0.025042 | 0.1861975 | 0.210238 | 0.041906 | 0.106107 | 0.055287 |
| | Nucleus | | | | | | |
| DNA | Caudate | 0.079294 | 3.9433175 | — | 0.0529005 | 0.2451035 | — |
| DNA | Hippocampus | 0.095436 | 1.760891 | 0.205433 | 0.368645 | 1.335324 | 0.432829 |
| DNA | SC-cervical | 0.0376 | 1.143863 | 0.061085 | 0.061535 | 0.07573 | 0.05885 |
| DNA | SC-Thoracic | 0.02692 | 0.933734 | 0.025955 | 0.05011 | 0.064915 | 0.0355 |
| DNA | SC-Lumbar | 0.03615 | 0.992728 | 0.019125 | 0.034175 | 0.085165 | 0.051475 |
| DNA | DRG- | 0.0765 | 0.14319 | 0.08196 | 0.13722 | 0.04115 | 0.071625 |
| | cervical | | | | | | |
| DNA | DRG- | 0.165865 | 0.172363 | 0.07202 | 0.133455 | 0.04444 | 0.03139 |
| | Thoracic | | | | | | |
| DNA | DRG- | 0.218725 | 0.385712 | 0.146115 | 0.153205 | 0.032875 | 0.12034 |
| | Lumbar | | | | | | |
| DNA | Lung | 1.085639916 | 3.72 | 0.958576278 | 0.700015423 | 1.22442329 | 0.919823152 |
| DNA | Pancreas | 0.256670617 | 20.535 | 0.320558325 | 0.240633195 | 0.067860607 | 0.004802583 |
| DNA | Colon | 0.053867646 | 3.405 | 1.179065405 | 0.348969617 | 0.116867365 | 0.015288464 |
| DNA | Kidney | 0.896656371 | 26.635 | 4.861362029 | 0.532746958 | 0.386522209 | 7.973793288 |
| DNA | Liver | 207.332334 | 217.64 | 111.910319 | 193.8349405 | 448.5980021 | 213.0317219 |
| DNA | Adrenal | 1.647725996 | 0.69 | 1.561129869 | 1.871878 | 1.269473156 | 0.847293047 |
| DNA | Spleen | 14.93815481 | 20.43565 | 51.70294001 | 22.79095714 | 6.514778227 | 45.91987284 |
| DNA | Heart | 2.012377817 | 14.49 | 0.757528914 | 1.780956673 | 3.814571986 | 0.44694144 |
| DNA | Quadriceps | 0.724278943 | 1.285 | 0.476250457 | 1.366015493 | 5.611203726 | 0.646197937 |
| DNA | Diaphragm | — | 1.06 | — | — | — | — |

[1931] When calculated as fold over AAV9 the data were as shown in Table 22 below.

TABLE 22
Characterization of exemplary capsid variants

| Measure | Tissue | AAV9 | TTD-001 | TTD-002 | TTD-003 | TTD-004 | TTD-005 |
|---|---|---|---|---|---|---|---|
| mRNA | Frontal | 1.0 | 8378 | 2.4 | 19.3 | 21.8 | 6.8 |
| | Cortex | | | | | | |
| mRNA | Sensory | 1.0 | 2288 | 2.8 | 4.6 | 7.4 | 2.8 |
| | Cortex | | | | | | |
| mRNA | Motor Cortex | 1.0 | 14227 | 1.7 | 15.7 | 16.6 | 4.6 |
| mRNA | Putamen | 1.0 | 5805 | 2.3 | 19.3 | 18.7 | 1.9 |
| mRNA | Thalamus | 1.0 | 1097 | 5.3 | 38.8 | 29.0 | 4.2 |
| mRNA | Cerebellar | 1.0 | 1007 | 6.4 | 4.8 | 9.7 | 3.3 |
| | Cortex | | | | | | |
| mRNA | Dentate | 1.0 | 706 | — | — | — | — |
| | Nucleus | | | | | | |
| mRNA | Caudate | 1.0 | 3698 | — | — | — | — |
| mRNA | Hippocampus | 1.0 | 1305 | — | — | — | — |
| mRNA | SC-cervical | 1.0 | 973 | 1.8 | 2.2 | 7.2 | 0.5 |
| mRNA | SC-Thoracic | 1.0 | 61 | 0.1 | 0.7 | 0.4 | 0.1 |
| mRNA | SC-Lumbar | 1.0 | 267 | 1.9 | 0.5 | 1.6 | 0.9 |
| mRNA | DRG-cervical | 1.0 | 12 | 0.0 | 3.3 | 0.4 | 0.0 |
| mRNA | DRG-Thoracic | 1.0 | 9 | 0.0 | 15.7 | 0.2 | — |
| mRNA | DRG-Lumbar | 1.0 | 16 | 0.0 | 2.1 | 0.4 | 0.1 |
| mRNA | Lung | 1.0 | 0.11 | — | — | 2.9 | — |
| mRNA | Pancreas | — | — | — | — | — | — |
| mRNA | Colon | 1.0 | 0.28 | — | — | 10.2 | — |
| mRNA | Kidney | 1.0 | 0.15 | — | — | 0.9 | — |
| mRNA | Liver | 1.0 | 0.38 | — | — | 3.8 | — |
| mRNA | Adrenal | — | — | — | — | — | — |
| mRNA | Spleen | 1.0 | 0.07 | — | — | 1.0 | — |
| mRNA | Heart | 1.0 | 0.10 | — | — | 4.2 | — |
| mRNA | Quadriceps | 1.0 | — | — | — | 38.8 | — |
| mRNA | Diaphragm | 1.0 | — | — | — | 7.7 | — |
| DNA | Frontal | 1.0 | 27.29 | 1.3 | 0.9 | 4.9 | 1.6 |
| | Cortex | | | | | | |
| DNA | Sensory | 1.0 | 28.82 | 0.8 | 0.4 | 2.9 | 1.4 |
| | Cortex | | | | | | |
| DNA | Motor Cortex | 1.0 | 49.38 | 1.0 | 1.1 | 3.6 | 1.3 |
| DNA | Putamen | 1.0 | 52.96 | 2.1 | 2.6 | 4.7 | 1.2 |
| DNA | Thalamus | 1.0 | 39.63 | 1.3 | 1.7 | 4.1 | 1.7 |
| DNA | Cerebellar | 1.0 | 13.09 | 0.7 | 0.7 | 2.5 | 0.9 |
| | Cortex | | | | | | |
| DNA | Dentate | 1.0 | 7.44 | 8.4 | 1.7 | 4.2 | 2.2 |
| | Nucleus | | | | | | |
| DNA | Caudate | 1.0 | 49.73 | — | 0.7 | 3.1 | — |
| DNA | Hippocampus | 1.0 | 18.45 | 2.2 | 3.9 | 14.0 | 4.5 |
| DNA | SC-cervical | 1.0 | 30.42 | 1.6 | 1.6 | 2.0 | 1.6 |
| DNA | SC-Thoracic | 1.0 | 34.69 | 1.0 | 1.9 | 2.4 | 1.3 |
| DNA | SC-Lumbar | 1.0 | 27.46 | 0.5 | 0.9 | 2.4 | 1.4 |
| DNA | DRG-cervical | 1.0 | 1.87 | 1.1 | 1.8 | 0.5 | 0.9 |
| DNA | DRG-Thoracic | 1.0 | 1.04 | 0.4 | 0.8 | 0.3 | 0.2 |
| DNA | DRG-Lumbar | 1.0 | 1.76 | 0.7 | 0.7 | 0.2 | 0.6 |
| DNA | Lung | 1.0 | 3.43 | 0.9 | 0.6 | 1.1 | 0.8 |
| DNA | Pancreas | 1.0 | 80.01 | 1.2 | 0.9 | 0.3 | 0.0 |
| DNA | Colon | 1.0 | 63.21 | 21.9 | 6.5 | 2.2 | 0.3 |
| DNA | Kidney | 1.0 | 29.70 | 5.4 | 0.6 | 0.4 | 8.9 |
| DNA | Liver | 1.0 | 1.05 | 0.5 | 0.9 | 2.2 | 1.0 |
| DNA | Adrenal | 1.0 | 0.42 | 0.9 | 1.1 | 0.8 | 0.5 |
| DNA | Spleen | 1.0 | 1.37 | 3.5 | 1.5 | 0.4 | 3.1 |
| DNA | Heart | 1.0 | 7.20 | 0.4 | 0.9 | 1.9 | 0.2 |
| DNA | Quadriceps | 1.0 | 1.77 | 0.7 | 1.9 | 7.7 | 0.9 |
| DNA | Diaphragm | — | — | — | — | — | — |

[1932] Capsid variant TTD-001 showed greater than 5,000 fold increase in payload-HA levels delivered to the brain as compared to AAV9 and measured by qRT-PCR and normalized to TBP. In all CNS tissues measured, TTD-001 showed dramatically enhanced delivery of payload-HA as compared to AAV9. Immunohistochemistry of fixed brain tissues revealed dramatic transduction in both NHP tested by TTD-001 of the dentate nucleus, cerebellar cortex, cerebral cortex, brain stem, hippocampus, thalamus and putamen. AAV9 transduction of the dentate nucleus, cerebellar cortex, cerebral cortex, hippocampus, thalamus and putamen appeared negligible in comparison. TTD-001 therefore demonstrated broad and robust expression and distribution in the brain following intravenous administration in NHPs. In the dorsal root ganglia, both TTD-001 and AAV9 showed similar IHC patterns.

### Example 3. Maturation of TTD-001 Capsid in NHPs

[1933] This Example describes maturation of the TTD-001 (SEQ ID NO: 3623 (DNA) and 3636 (amino acid), comprising SEQ ID NO: 3648) capsid variant to further enhance its transduction and biodistribution in the central nervous system and evolve the AAV capsid variants further. Two approaches were used to mature the TTD-001 capsid sequence in order to randomize and mutate within and around the peptide insert comprised within loop VIII of the capsid variant. In the first maturation approach, sets of three contiguous amino acids were randomized across the mutagenesis region in the TTD-001 sequence, which spanned from position 587 to position 602, numbered according to SEQ ID NO: 3636. In the second maturation approach, mutagenic primers were used to introduce point mutations at a low frequency, scattered across the mutagenesis region in the TTD-001 sequences ranging from position 587 to position 602, numbered according to SEQ ID NO: 3636. AAV capsid variants arising from each maturation approach for TTD-001 were pooled together, for subsequent testing and characterization in NHPs (Macaca fascicularis and Callithrix jacchus).

[1934] The library of pooled matured AAV capsid variants generated from TTD-001 matured AAV capsid variant were injected into two cynomolgus macaques (Macaca fascicularis), two marmosets (Callithrix jacchus). After a period in life, the brains of the NHPs were isolated and RNA was extracted from three samples per NHP. Following RNA recovery and RT-PCR amplification, a systematic NGS enrichment analysis was performed to calculate the fold enrichment ratio relative to the corresponding TTD-001 control, and the peptides comprised within the variants were identified. The coefficient of variance (CV) was calculated for each peptide across the six samples, and those that had a CV value<1 were identified, as these were the peptides that were reliably detected in 5/6 or 6/6 of the brain samples isolated from the two NHPs. The average number of reads for each peptide across the samples investigated was also quantified. These TTD-001 matured capsid variants and their peptide sequences are provided in Table 23 (cynomolgus macaques (Macaca fascicularis)) and Table 24 (marmosets (Callithrix jacchus)).

[1935] As shown in Table 23, approximately 338 TTD-001 matured capsid variants demonstrated increased expression relative to the non-matured TTD-001 control, and several variants demonstrated greater than a two-fold enrichment relative to the non-matured TTD-001 control, in cynomolgus macaques (Macaca fascicularis). Also, across the peptides comprised within the TTD-001 matured capsid variants with the greatest fold-enrichment relative to the non-matured TTD-001 capsid in the brains of cynomolgus macaques, it was observed that the modifications in the variant sequences appeared in the C-terminal portion, specifically at residues corresponding to positions 593-595 of a reference sequence numbered according to the amino acid sequence of SEQ ID NO: 138. Additionally, 378 of the top peptides in Table 23 had an average read value of 1 or greater per sample, demonstrating that more functional capsid material was recovered, which could be indicative of less aggregation.

[1936] As shown in Table 24, many TTD-001 matured capsid variants demonstrated increased expression relative to both the AAV9 and the non-matured TTD-001 controls in the brains of marmosets. Approximately, 967 TTD-001 matured variants demonstrated increased expression relative to the non-matured TTD-001 control in the brain of marmosets, with 296 variants showing at least a 10-fold enrichment or greater relative to the non-matured TTD-001 control. Approximately, 850 TTD-001 matured variants demonstrated increased expression relative to AAV9 in the brain of marmosets, with 222 variants showing at least a 10-fold enrichment or greater relative to AAV9. With respect to those TTD-001 matured variants that demonstrated an increased expression in marmosets, it was observed that the majority comprised an amino acid other than Q at position 604 (e.g., Q604) numbered according to SEQ ID NO: 5, 8, or 3636 or at position 597 (Q597) numbered according to SEQ ID NO: 138 (e.g., an E, H, K, or P), such that they comprised the triplet “VEN,” “VHN,” “VKN,” or “VPN” at their C-terminus (corresponding to positions 596-598 of SEQ ID: 138 or positions 603-605 of SEQ ID NO: 5, 8, and 3636). Many of these TTD-001 matured variants also demonstrated an increased expression in the brain of cynomolgus macaques relative to AAV9 (Table 24), including the TTD-001 matured capsid variant comprising the sequence PLNGAVHLYAQAQLSPVKN (SEQ ID NO: 566) and the TTD-001 matured capsid variant comprising the sequence PLNGAVHLYAQAQTGWVPN (SEQ ID NO: 314).

[1937] The fold-change in expression relative to AAV9 and TTD-001 was also calculated in the DRG, heart, muscle (quadriceps), and liver for the TTD-001 matured variants in cynomolgus macaques. The fold-change in the DRG is shown in Table 24, with several variants showing decreased or comparable expression in the DRG relative to AAV9. These variants also demonstrated comparable or lower expression relative to AAV9 in the heart, muscle, and liver.

[1938] Taken together, these data demonstrate that following two maturation approaches, matured TTD-001 capsid variants with loop VIII modifications were generated with significantly enhanced CNS tropism in NHPs (cynomolgus macaques (Macaca fascicularis) and marmosets (Callithrix jacchus)), compared to the corresponding non-matured TTD-001 capsid variant, which already exhibited a significant fold enrichment over AAV9 in the NHP brain.

TABLE 23
NGS fold-enrichment of TTD-001 matured AAV capsid variants in the brain of NHPs

| | | | Fold | | | | | Fold | |
|---|---|---|---|---|---|---|---|---|---|
| | | | enrich- | | | | | enrich- | |
| Peptide | SEQ | | ment | | Peptide | SEQ | | ment | |
| Se- | ID | | over | Avg. | Se- | ID | | over | Avg. |
| quence | NO: | CV | TTD-001 | Reads | quence | NO: | CV | TTD-001 | Reads |
| QLNGAV | 139 | 0.206 | 5.617 | 0.09 | QLNGYV | 1138 | 0.513 | 0.626 | 0.09 |
| HLYAQA | | | | | HLYAQA | | | | |
| QLSPVQ | | | | | QTGWVQ | | | | |
| N | | | | | N | | | | |
| PLDGAV | 140 | 0.829 | 5.133 | 4.02 | QLNGAV | 639 | 0.845 | 0.626 | 0.09 |
| HLYAQP | | | | | HLYAQA | | | | |
| QTGWVQ | | | | | QTTGVQ | | | | |
| N | | | | | N | | | | |
| QLNGAV | 141 | 0.770 | 4.088 | 0.09 | PLNGAV | 640 | 0.602 | 0.625 | 39.96 |
| HLYAQA | | | | | HLYAQA | | | | |
| QTMSVQ | | | | | QTGFVQ | | | | |
| N | | | | | N | | | | |
| PLDSSV | 142 | 0.882 | 3.891 | 1.4 | PLNGAV | 641 | 0.536 | 0.625 | 42.62 |
| HLYAQA | | | | | HLYAQA | | | | |
| QTGWVQ | | | | | QSALVQ | | | | |
| N | | | | | N | | | | |
| PLNGAV | 143 | 0.879 | 3.879 | 5.47 | ALNGAV | 642 | 0.278 | 0.624 | 0.75 |
| HLYAQA | | | | | HLYAQA | | | | |
| QTTKVQ | | | | | QTGWDQ | | | | |
| N | | | | | N | | | | |
| PLDGAV | 144 | 0.586 | 3.835 | 11.08 | QLNGAV | 643 | 0.636 | 0.623 | 0.09 |
| HLYAQA | | | | | HLYAQA | | | | |
| QTGSVQ | | | | | QISGVQ | | | | |
| N | | | | | N | | | | |
| ALNGAV | 145 | 0.865 | 3.765 | 0.09 | QLNGAV | 644 | 0.520 | 0.623 | 0.14 |
| HLYAQA | | | | | HLYAQA | | | | |
| QTTSVQ | | | | | QRGSVQ | | | | |
| N | | | | | N | | | | |
| PLNGSV | 146 | 0.509 | 3.708 | 0.09 | PLNGAV | 645 | 0.270 | 0.622 | 0.19 |
| HLYAQA | | | | | HLYAQA | | | | |
| QTMSVQ | | | | | QTGWVK | | | | |
| N | | | | | T | | | | |
| QLNGAV | 147 | 0.310 | 3.638 | 0.14 | PLNGAV | 646 | 0.554 | 0.619 | 27.62 |
| HLYAQA | | | | | HLYAQA | | | | |
| QTSPVQ | | | | | QSQLVQ | | | | |
| N | | | | | N | | | | |
| PLNGAV | 148 | 0.547 | 3.634 | 5.61 | PLNGSV | 647 | 0.202 | 0.617 | 0.33 |
| HLYAQA | | | | | HLYAQA | | | | |
| QTMKVQ | | | | | QTGWGQ | | | | |
| N | | | | | N | | | | |
| PLNGAV | 149 | 0.397 | 3.550 | 21.87 | QLNGAV | 648 | 0.632 | 0.616 | 0.14 |
| HLYAQA | | | | | HLYAQA | | | | |
| QVAQVQ | | | | | QTGWVP | | | | |
| N | | | | | N | | | | |
| PLDGAV | 150 | 0.771 | 3.509 | 2.29 | PLNGAV | 649 | 0.305 | 0.615 | 0.33 |
| HLYAQA | | | | | HLYAKA | | | | |
| QTGGVQ | | | | | QTGWVK | | | | |
| Z | | | | | N | | | | |
| PLNGAV | 151 | 0.344 | 3.373 | 0.09 | PLNGAV | 650 | 0.164 | 0.615 | 0.09 |
| HLYAQA | | | | | HLYAHA | | | | |
| QTAWDQ | | | | | QTGWGQ | | | | |
| N | | | | | N | | | | |
| PLNGSV | 152 | 0.190 | 3.335 | 0.23 | ALNGAV | 651 | 0.330 | 0.613 | 0.61 |
| HLYAQA | | | | | HLYAQA | | | | |
| QTGWDQ | | | | | QTGWVQ | | | | |
| N | | | | | H | | | | |
| PLNGAV | 153 | 0.235 | 3.287 | 0.14 | PLNGSV | 652 | 0.585 | 0.612 | 0.14 |
| HLYAQA | | | | | HLYAQA | | | | |
| QTGSVQ | | | | | QIASVQ | | | | |
| H | | | | | N | | | | |
| PLNGAV | 154 | 0.564 | 3.259 | 4.25 | ALNGAV | 653 | 0.416 | 0.611 | 0.14 |
| HLYAQA | | | | | HLYAQA | | | | |
| QVKQVQ | | | | | QTAMVQ | | | | |
| N | | | | | N | | | | |
| PLNGAV | 155 | 0.763 | 3.239 | 24.54 | TLNGAV | 654 | 0.316 | 0.610 | 0.09 |
| HLYAQA | | | | | HLYAQA | | | | |
| QSAPVQ | | | | | QTMAVQ | | | | |
| N | | | | | N | | | | |
| PLNGAV | 156 | 0.591 | 3.156 | 6.73 | PHNGAV | 655 | 0.476 | 0.609 | 0.09 |
| HLYAQA | | | | | HLYAQA | | | | |
| QLSKVQ | | | | | QVSSVQ | | | | |
| N | | | | | N | | | | |
| PLNGAV | 157 | 0.587 | 3.107 | 31.03 | PLNGAV | 656 | 0.693 | 0.606 | 0.09 |
| HLYAQA | | | | | QLYAQA | | | | |
| QLAPVQ | | | | | QTAPVQ | | | | |
| N | | | | | N | | | | |
| PLNGAV | 158 | 0.416 | 3.061 | 15.33 | PLNGSV | 657 | 0.282 | 0.605 | 0.09 |
| HLYAQA | | | | | HLYAQA | | | | |
| QLAQVQ | | | | | QKGSVQ | | | | |
| N | | | | | N | | | | |
| QLNGAV | 159 | 0.295 | 3.051 | 0.09 | PLNGAV | 658 | 0.574 | 0.605 | 39.3 |
| HLYAQA | | | | | HLYAQA | | | | |
| QVASVQ | | | | | QLSAVQ | | | | |
| N | | | | | N | | | | |
| PLNGAV | 160 | 0.877 | 2.998 | 8.97 | PINGAV | 659 | 0.489 | 0.605 | 0.09 |
| HLYAQA | | | | | HLYAQA | | | | |
| QTAKVQ | | | | | QVSAVQ | | | | |
| N | | | | | N | | | | |
| PLNGAV | 161 | 0.678 | 2.971 | 3.27 | PLNGSV | 660 | 0.514 | 0.604 | 43.37 |
| HLYAQA | | | | | HLYAQA | | | | |
| QSAKVQ | | | | | QTGLVQ | | | | |
| N | | | | | N | | | | |
| PLNGAV | 162 | 0.095 | 2.962 | 0.09 | PLNGAV | 661 | 0.223 | 0.604 | 0.14 |
| HLYAQA | | | | | HIYAQA | | | | |
| QTGCFQ | | | | | QTGWFQ | | | | |
| N | | | | | N | | | | |
| PLNGAV | 163 | 0.705 | 2.958 | 5.51 | SLNGAV | 662 | 0.293 | 0.603 | 0.09 |
| HLYAQA | | | | | HLYAQA | | | | |
| QTQKVQ | | | | | QIASVQ | | | | |
| N | | | | | N | | | | |
| PLNGSV | 164 | 0.529 | 2.873 | 0.09 | PLNGAV | 663 | 0.220 | 0.601 | 0.14 |
| HLYAQA | | | | | HLYAQE | | | | |
| QTTSVQ | | | | | QTVSVQ | | | | |
| N | | | | | N | | | | |
| PLNGGV | 165 | 0.820 | 2.858 | 4.25 | PLNGAV | 664 | 0.737 | 0.601 | 0.09 |
| HLYAQA | | | | | HLYAQA | | | | |
| QTGRVQ | | | | | QTMQVQ | | | | |
| N | | | | | T | | | | |
| PLNGAV | 166 | 0.410 | 2.854 | 30.94 | HLNGAV | 665 | 0.338 | 0.600 | 56.78 |
| HLYAQA | | | | | HLYAQA | | | | |
| QTVAVQ | | | | | QTGWVQ | | | | |
| N | | | | | N | | | | |
| ALNGAV | 167 | 0.542 | 2.851 | 0.09 | PLNGAV | 666 | 0.400 | 0.600 | 24.02 |
| HLYAQA | | | | | HLYAQA | | | | |
| QSSPVQ | | | | | QTGQVQ | | | | |
| N | | | | | N | | | | |
| PLNGAV | 168 | 0.313 | 2.820 | 63.28 | QLNGAV | 667 | 0.596 | 0.599 | 0.19 |
| HLYAQA | | | | | HLYAQA | | | | |
| QLSPVQ | | | | | QTGWVQ | | | | |
| N | | | | | D | | | | |
| QLNGAV | 169 | 0.846 | 2.769 | 0.14 | PLNGAV | 668 | 0.526 | 0.599 | 0.09 |
| HLYAQA | | | | | HLYDQA | | | | |
| QTTSVQ | | | | | QVAQVQ | | | | |
| N | | | | | N | | | | |
| PLNGAV | 170 | 0.334 | 2.719 | 18.37 | PLNGAV | 669 | 0.515 | 0.598 | 0.19 |
| HLYAQA | | | | | HLYAQA | | | | |
| QTTQVQ | | | | | QTSPVK | | | | |
| N | | | | | N | | | | |
| PLNGAV | 171 | 0.523 | 2.707 | 25.84 | PLNGAI | 670 | 0.383 | 0.595 | 0.09 |
| HLYAQA | | | | | HLYAQA | | | | |
| QTAQVQ | | | | | QTSPVQ | | | | |
| N | | | | | N | | | | |
| QLNGAV | 172 | 0.195 | 2.682 | 0.09 | PLNGSV | 671 | 0.578 | 0.595 | 0.19 |
| HLYAQA | | | | | HLYAQA | | | | |
| QTVAVQ | | | | | QTAMVQ | | | | |
| N | | | | | N | | | | |
| PLNGAV | 173 | 0.682 | 2.652 | 3.27 | PLNGAV | 672 | 0.370 | 0.594 | 0.09 |
| HLYAQA | | | | | HLYAQA | | | | |
| QRIAVQ | | | | | QLSQVQ | | | | |
| N | | | | | T | | | | |
| PLNGAV | 174 | 0.340 | 2.634 | 17.34 | PLNGAV | 673 | 0.310 | 0.594 | 0.19 |
| HLYAQA | | | | | HLYAQA | | | | |
| QRASVQ | | | | | QTGSVL | | | | |
| N | | | | | N | | | | |
| PLNGAV | 175 | 0.400 | 2.620 | 45.19 | PLNGAI | 674 | 0.428 | 0.593 | 0.09 |
| HLYAQA | | | | | HLYAQA | | | | |
| QTTPVQ | | | | | QTASVQ | | | | |
| N | | | | | N | | | | |
| QLNGAV | 176 | 0.474 | 2.613 | 0.09 | PLNGAV | 675 | 0.785 | 0.592 | 6.68 |
| HLYAQA | | | | | HLYAQA | | | | |
| QLASVQ | | | | | QTNGVQ | | | | |
| N | | | | | N | | | | |
| PLNGAV | 177 | 0.528 | 2.574 | 39.86 | PLNGSV | 676 | 0.334 | 0.591 | 0.14 |
| HLYAQA | | | | | HLYAQA | | | | |
| QLTPVQ | | | | | QTGWVQ | | | | |
| N | | | | | Y | | | | |
| PLNGAV | 178 | 0.519 | 2.572 | 26.5 | PLNGAL | 677 | 0.463 | 0.590 | 0.09 |
| HLYAQA | | | | | HLYAQA | | | | |
| QSTPVQ | | | | | QTSPVQ | | | | |
| N | | | | | N | | | | |
| PLNGAV | 179 | 0.335 | 2.562 | 72.81 | ALNGAV | 678 | 0.399 | 0.589 | 1.59 |
| HLYAQA | | | | | HLYAQA | | | | |
| QTSPVQ | | | | | QTGWVQ | | | | |
| N | | | | | T | | | | |
| QLNGAV | 180 | 0.428 | 2.528 | 0.09 | PLNGAV | 679 | 0.193 | 0.586 | 0.47 |
| HLYAQA | | | | | HLYAQA | | | | |
| QVSQVQ | | | | | QTGWVK | | | | |
| N | | | | | K | | | | |
| PLNGAV | 181 | 0.625 | 2.523 | 19.96 | QLNGAV | 680 | 0.630 | 0.584 | 1450 |
| HLYAQA | | | | | HLYAQA | | | | |
| QTMQVQ | | | | | QTGWVQ | | | | |
| N | | | | | N | | | | |
| PLNGAV | 182 | 0.458 | 2.476 | 8.32 | PLNGDV | 681 | 0.630 | 0.580 | 0.09 |
| HLYAQA | | | | | HLYAQA | | | | |
| QTSKVQ | | | | | QTVAVQ | | | | |
| N | | | | | N | | | | |
| SLNGAV | 183 | 0.282 | 2.417 | 0.09 | PLNGGV | 682 | 0.501 | 0.580 | 0.47 |
| HLYAQA | | | | | HLYAQA | | | | |
| QVSPVQ | | | | | QPGWVQ | | | | |
| N | | | | | N | | | | |
| PLNGAV | 184 | 0.259 | 2.411 | 34.72 | PLNGAV | 683 | 0.897 | 0.579 | 7.66 |
| HLYAQA | | | | | HLYAQA | | | | |
| QVSQVQ | | | | | QAAAVQ | | | | |
| N | | | | | N | | | | |
| PLNGAV | 185 | 0.721 | 2.404 | 63.42 | PLNGAV | 684 | 0.618 | 0.579 | 19.72 |
| HLYAQA | | | | | HLYAQA | | | | |
| QVSPVQ | | | | | QSAVVQ | | | | |
| N | | | | | N | | | | |
| PLNGAV | 186 | 0.586 | 2.389 | 15.56 | TLNGAV | 685 | 0.646 | 0.578 | 0.09 |
| HLYAQA | | | | | HLYAQA | | | | |
| QTVQVQ | | | | | QRSSVQ | | | | |
| N | | | | | N | | | | |
| PLNGAV | 187 | 0.476 | 2.367 | 13.65 | PLNGAV | 686 | 0.214 | 0.578 | 0.14 |
| HLYAQA | | | | | HLYAQA | | | | |
| QVTAVQ | | | | | QPGWVQ | | | | |
| N | | | | | H | | | | |
| PLNGAV | 188 | 0.715 | 2.353 | 8.74 | PLDGAV | 687 | 0.214 | 0.577 | 0.09 |
| HLYAQA | | | | | HLYAQA | | | | |
| QRQPVQ | | | | | QTLSVQ | | | | |
| N | | | | | N | | | | |
| PLNGNV | 189 | 0.732 | 2.346 | 2.38 | PLNGAV | 688 | 0.310 | 0.575 | 0.19 |
| HLYAQA | | | | | HLYAQA | | | | |
| QTGGVQ | | | | | QTASDQ | | | | |
| N | | | | | N | | | | |
| PLDGAV | 190 | 0.697 | 2.339 | 7.06 | PLNGAV | 689 | 0.633 | 0.575 | 53.51 |
| HLYAQA | | | | | HLYAQA | | | | |
| QTAWVQ | | | | | QLSGVQ | | | | |
| N | | | | | N | | | | |
| PLNGAV | 191 | 0.785 | 2.331 | 9.91 | TLNGAV | 690 | 0.463 | 0.572 | 0.14 |
| HLYAQA | | | | | HLYAQA | | | | |
| QISGVQ | | | | | QTVAVQ | | | | |
| N | | | | | N | | | | |
| PLNGAV | 192 | 0.794 | 2.324 | 6.22 | PLNGAV | 691 | 0.293 | 0.572 | 0.09 |
| HLYAQA | | | | | HLYAQE | | | | |
| QVRPVQ | | | | | QVASVQ | | | | |
| N | | | | | N | | | | |
| PLNGAV | 193 | 0.722 | 2.299 | 20.47 | PVNGAV | 692 | 0.873 | 0.572 | 0.09 |
| HLYAQA | | | | | HLYAQA | | | | |
| QLGPVQ | | | | | QTGWAQ | | | | |
| N | | | | | N | | | | |
| PLNGAV | 194 | 0.404 | 2.290 | 4.91 | PLNGAV | 693 | 0.567 | 0.570 | 14.07 |
| HLYAQA | | | | | HLYAQA | | | | |
| QTNQVQ | | | | | QSSRVQ | | | | |
| N | | | | | N | | | | |
| PLNGAV | 195 | 0.291 | 2.240 | 14.39 | PLNGSV | 694 | 0.551 | 0.569 | 0.19 |
| HLYAQA | | | | | HLYAQA | | | | |
| QVQQVQ | | | | | QLGSVQ | | | | |
| N | | | | | N | | | | |
| PLNGAV | 196 | 0.520 | 2.238 | 9.21 | PLNGAV | 695 | 0.565 | 0.568 | 1.22 |
| HLYAQA | | | | | HLYAQA | | | | |
| QVANVQ | | | | | QSPPVQ | | | | |
| N | | | | | N | | | | |
| PLNGAV | 197 | 0.664 | 2.200 | 10.75 | PLNGAV | 696 | 0.605 | 0.567 | 0.14 |
| HLYAQA | | | | | HHYAQA | | | | |
| QAAPVQ | | | | | QTTSVQ | | | | |
| N | | | | | N | | | | |
| QLNGAV | 198 | 0.388 | 2.199 | 0.09 | PLNGAV | 697 | 0.832 | 0.567 | 0.09 |
| HLYAQA | | | | | HLYDQA | | | | |
| QVAQVQ | | | | | QSTPVQ | | | | |
| N | | | | | N | | | | |
| PLNGAV | 199 | 0.487 | 2.195 | 21.59 | QLNGAV | 698 | 0.529 | 0.567 | 0.37 |
| HLYAQA | | | | | HLYAQA | | | | |
| QRSTVQ | | | | | QTGWVR | | | | |
| N | | | | | N | | | | |
| PLNGAV | 200 | 0.334 | 2.190 | 29.72 | PLNGAV | 699 | 0.597 | 0.563 | 0.09 |
| HLYAQA | | | | | HLYAQA | | | | |
| QTMAVQ | | | | | QVQPVQ | | | | |
| N | | | | | T | | | | |
| PLNGAV | 201 | 0.838 | 2.182 | 7.1 | PLNGAV | 700 | 0.416 | 0.562 | 0.14 |
| HLYAQA | | | | | HLYAQA | | | | |
| QIQPVQ | | | | | QTSSVK | | | | |
| N | | | | | N | | | | |
| PLNGAV | 202 | 0.567 | 2.181 | 15.52 | PLNGAL | 701 | 0.301 | 0.560 | 0.09 |
| HLYAQA | | | | | HLYAQA | | | | |
| QIASVQ | | | | | QTASVQ | | | | |
| N | | | | | N | | | | |
| PLNGAV | 203 | 0.172 | 2.176 | 76.22 | PLNGAV | 702 | 0.731 | 0.558 | 0.09 |
| HLYAQA | | | | | HHYAQA | | | | |
| QTVSVQ | | | | | QSAPVQ | | | | |
| N | | | | | N | | | | |
| PLNGAV | 204 | 0.585 | 2.156 | 12.43 | PLNGSV | 703 | 0.169 | 0.556 | 0.47 |
| HLYAQA | | | | | HLYAQA | | | | |
| QRGSVQ | | | | | QTGWVH | | | | |
| N | | | | | N | | | | |
| PLNGAV | 205 | 0.376 | 2.143 | 12.85 | PLNGAV | 704 | 0.519 | 0.556 | 0.09 |
| HLYAQA | | | | | HLYAQA | | | | |
| QNSPVQ | | | | | QLSPLQ | | | | |
| N | | | | | N | | | | |
| PLNGAV | 206 | 0.363 | 2.131 | 24.3 | PLNGAV | 705 | 0.841 | 0.554 | 0.09 |
| HLYAQA | | | | | HLYAKA | | | | |
| QLQPVQ | | | | | QVTPVQ | | | | |
| N | | | | | N | | | | |
| PLNGAV | 207 | 0.550 | 2.125 | 11.68 | PLNGAV | 706 | 0.278 | 0.554 | 0.09 |
| HLYAQA | | | | | NLYAQA | | | | |
| QVTGVQ | | | | | QTQPVQ | | | | |
| N | | | | | N | | | | |
| PLNGAV | 208 | 0.810 | 2.121 | 11.26 | SLNGAV | 707 | 0.518 | 0.553 | 92.07 |
| HLYAQA | | | | | HLYAQA | | | | |
| QVMQVQ | | | | | QTGLVQ | | | | |
| N | | | | | N | | | | |
| PLNGAV | 209 | 0.697 | 2.104 | 14.86 | PLDGSV | 708 | 0.366 | 0.552 | 0.09 |
| HLYAQA | | | | | HLYAQA | | | | |
| QSMAVQ | | | | | QTGGVQ | | | | |
| N | | | | | N | | | | |
| PLNGAV | 210 | 0.611 | 2.104 | 4.49 | PLNGAV | 709 | 0.528 | 0.552 | 0.09 |
| HLYAQA | | | | | HLYDQA | | | | |
| QVGKVQ | | | | | QTLPVQ | | | | |
| N | | | | | N | | | | |
| ALNGAV | 211 | 0.652 | 2.101 | 0.09 | PLNGAV | 710 | 0.441 | 0.551 | 0.09 |
| HLYAQA | | | | | HLYAQA | | | | |
| QSAPVQ | | | | | QVSQVQ | | | | |
| N | | | | | K | | | | |
| PLNGAV | 212 | 0.498 | 2.101 | 3.97 | PLNGAV | 711 | 0.425 | 0.551 | 13.97 |
| HLYAQA | | | | | HLYAQA | | | | |
| QIQSVQ | | | | | QLVGVQ | | | | |
| N | | | | | N | | | | |
| PLNGAV | 213 | 0.537 | 2.097 | 17.15 | PLNGAV | 712 | 0.390 | 0.549 | 0.09 |
| HLYAQA | | | | | HLYAQE | | | | |
| QCSPVQ | | | | | QTSSVQ | | | | |
| N | | | | | N | | | | |
| PLNGAV | 214 | 0.821 | 2.079 | 3.97 | PLNGAV | 713 | 0.435 | 0.549 | 0.09 |
| HLYAQA | | | | | HIYAQA | | | | |
| QLQRVQ | | | | | QTVAVQ | | | | |
| N | | | | | N | | | | |
| PLNGAV | 215 | 0.330 | 2.063 | 0.09 | PLNGAV | 714 | 0.831 | 0.548 | 0.14 |
| HLYAQA | | | | | NLYAQA | | | | |
| QTAWVQ | | | | | QVTPVQ | | | | |
| H | | | | | N | | | | |
| PLDGAV | 216 | 0.650 | 2.062 | 0.09 | TLNGAV | 715 | 0.252 | 0.547 | 0.19 |
| HLYAQA | | | | | HLYAQA | | | | |
| QTGWDQ | | | | | QTMSVQ | | | | |
| N | | | | | N | | | | |
| PLNGAV | 217 | 0.411 | 2.062 | 0.89 | TLNGAV | 716 | 0.341 | 0.541 | 0.09 |
| HLYAQA | | | | | HLYAQA | | | | |
| QTPPVQ | | | | | QTLAVQ | | | | |
| N | | | | | N | | | | |
| PLNGAV | 218 | 0.635 | 2.054 | 1.68 | PINGAV | 717 | 0.341 | 0.540 | 0.09 |
| HLYAQA | | | | | HLYAQA | | | | |
| QVTKVQ | | | | | QVAQVQ | | | | |
| N | | | | | N | | | | |
| PLNGAV | 219 | 0.556 | 2.033 | 50.94 | PLNGQV | 718 | 0.885 | 0.540 | 12.57 |
| HLYAQA | | | | | HLYAQA | | | | |
| QSSPVQ | | | | | QTGWVQ | | | | |
| N | | | | | N | | | | |
| PLNGAV | 220 | 0.793 | 2.015 | 9.07 | QLNGAV | 719 | 0.892 | 0.540 | 39.63 |
| HLYAQA | | | | | HLYAQA | | | | |
| QAGPVQ | | | | | QTGGVQ | | | | |
| N | | | | | N | | | | |
| PLNGAV | 221 | 0.773 | 2.014 | 5.89 | PLNGAV | 720 | 0.542 | 0.539 | 0.09 |
| HLYAQA | | | | | HLYAQA | | | | |
| QLARVQ | | | | | QTLSVK | | | | |
| N | | | | | N | | | | |
| PLNGAV | 222 | 0.789 | 2.013 | 16.36 | PLNGTV | 721 | 0.331 | 0.538 | 0.37 |
| HLYAQA | | | | | HLYAQA | | | | |
| QTTTVQ | | | | | QTGWDQ | | | | |
| N | | | | | N | | | | |
| PLNGAV | 223 | 0.254 | 2.011 | 0.09 | PLNGAV | 722 | 0.476 | 0.537 | 0.14 |
| HLYAQA | | | | | HLYAQA | | | | |
| QTGGFQ | | | | | QTGWFQ | | | | |
| N | | | | | K | | | | |
| PLNGAV | 224 | 0.657 | 2.010 | 24.44 | ALNGAV | 723 | 0.447 | 0.536 | 0.09 |
| HLYAQA | | | | | HLYAQA | | | | |
| QTLQVQ | | | | | QTSKVQ | | | | |
| N | | | | | N | | | | |
| PLNGAV | 225 | 0.359 | 2.005 | 63.42 | ALNGTV | 724 | 0.712 | 0.535 | 49.16 |
| HLYAQA | | | | | HLYAQA | | | | |
| QTMSVQ | | | | | QTGWVQ | | | | |
| N | | | | | N | | | | |
| QLNGAV | 226 | 0.675 | 2.004 | 0.09 | PLNGAV | 725 | 0.256 | 0.534 | 0.14 |
| HLYAQA | | | | | PLYAQA | | | | |
| QLQPVQ | | | | | QTGWVQ | | | | |
| N | | | | | H | | | | |
| PLNGAV | 227 | 0.894 | 1.994 | 10.47 | PLNGAV | 726 | 0.355 | 0.533 | 0.23 |
| HLYAQA | | | | | HLYAQA | | | | |
| QVAKVQ | | | | | KTGWVQ | | | | |
| N | | | | | K | | | | |
| PLNGAV | 228 | 0.217 | 1.989 | 7.24 | PLNGAV | 727 | 0.492 | 0.531 | 1.12 |
| HLYAQA | | | | | HLYAQA | | | | |
| QRAAVQ | | | | | QTPAVQ | | | | |
| N | | | | | N | | | | |
| PLNGAV | 229 | 0.413 | 1.988 | 38.79 | PLNGAV | 728 | 0.538 | 0.531 | 0.14 |
| HLYAQA | | | | | HLYAQA | | | | |
| QTVGVQ | | | | | QTVGVK | | | | |
| N | | | | | N | | | | |
| PLNGAV | 230 | 0.381 | 1.972 | 15.84 | PLNGAV | 729 | 0.307 | 0.530 | 0.14 |
| HLYAQA | | | | | HLYAQE | | | | |
| QLNPVQ | | | | | QTGWFQ | | | | |
| N | | | | | N | | | | |
| PLNGAV | 231 | 0.379 | 1.971 | 26.17 | PLNGAV | 730 | 0.569 | 0.530 | 0.09 |
| HLYAQA | | | | | HLYAQA | | | | |
| QLSQVQ | | | | | QKGWDQ | | | | |
| N | | | | | N | | | | |
| PLNGTV | 232 | 0.421 | 1.967 | 23.37 | PLNGAV | 731 | 0.605 | 0.529 | 0.09 |
| HLYAQA | | | | | HLYDQA | | | | |
| QTGSVQ | | | | | QTSAVQ | | | | |
| N | | | | | N | | | | |
| PLNGAV | 233 | 0.543 | 1.960 | 12.95 | PLDGAV | 732 | 0.657 | 0.527 | 0.37 |
| HLYAQA | | | | | HLYAQA | | | | |
| QTKPVQ | | | | | QTGWVQ | | | | |
| N | | | | | K | | | | |
| PLNGAV | 234 | 0.603 | 1.957 | 7.71 | PLNGAV | 733 | 0.290 | 0.524 | 0.09 |
| HLYAQA | | | | | HLYAQA | | | | |
| QTNAVQ | | | | | QTAWVL | | | | |
| N | | | | | N | | | | |
| ALDGAV | 235 | 0.660 | 1.955 | 21.4 | PLNGSV | 734 | 0.172 | 0.524 | 0.28 |
| HLYAQA | | | | | HLYAQA | | | | |
| QTGWVQ | | | | | QTGWVL | | | | |
| N | | | | | N | | | | |
| PLNGAV | 236 | 0.303 | 1.955 | 22.06 | QLNGAV | 735 | 0.605 | 0.524 | 1.68 |
| HLYAQA | | | | | HLYAQA | | | | |
| QLATVQ | | | | | QTGWVQ | | | | |
| N | | | | | T | | | | |
| PLNGAV | 237 | 0.794 | 1.947 | 40.85 | PLNGAV | 736 | 0.699 | 0.524 | 0.98 |
| HLYAQA | | | | | HLYAQA | | | | |
| QVTPVQ | | | | | QVPPVQ | | | | |
| N | | | | | N | | | | |
| PLNGAV | 238 | 0.339 | 1.946 | 22.2 | PVNGAV | 737 | 0.734 | 0.522 | 0.09 |
| HLYAQA | | | | | HLYAQA | | | | |
| QVQAVQ | | | | | QVQSVQ | | | | |
| N | | | | | N | | | | |
| PLNGAV | 239 | 0.645 | 1.926 | 58.32 | QLNGAV | 738 | 0.473 | 0.522 | 0.09 |
| HLYAQA | | | | | HLYAQA | | | | |
| QTTSVQ | | | | | QTKSVQ | | | | |
| N | | | | | N | | | | |
| PLNGAV | 240 | 0.702 | 1.923 | 9.21 | PVNGAV | 739 | 0.825 | 0.522 | 0.23 |
| HLYAQA | | | | | HLYAQA | | | | |
| QCTPVQ | | | | | QTSSVQ | | | | |
| N | | | | | N | | | | |
| ALNGAV | 241 | 0.621 | 1.916 | 9.58 | PLNGAV | 740 | 0.797 | 0.520 | 11.45 |
| HLYAQA | | | | | HLYAQA | | | | |
| QTGRVQ | | | | | QATGVQ | | | | |
| N | | | | | N | | | | |
| PLNGSV | 242 | 0.173 | 1.908 | 0.09 | TLNGAV | 741 | 0.553 | 0.518 | 0.09 |
| HLYAQA | | | | | HLYAQA | | | | |
| QTGWVQ | | | | | QLSQVQ | | | | |
| D | | | | | N | | | | |
| PLNGAV | 243 | 0.555 | 1.903 | 30.47 | PLDGAV | 742 | 0.486 | 0.517 | 0.37 |
| HLYAQA | | | | | HLYAQA | | | | |
| QTAGVQ | | | | | QTVSVQ | | | | |
| N | | | | | N | | | | |
| PLNGAV | 244 | 0.431 | 1.902 | 29.82 | SLNGAV | 743 | 0.421 | 0.514 | 0.09 |
| HLYAQA | | | | | HLYAQA | | | | |
| QTSQVQ | | | | | QTKPVQ | | | | |
| N | | | | | N | | | | |
| PLNGAV | 245 | 0.443 | 1.895 | 6.4 | PLKGAV | 744 | 0.705 | 0.514 | 0.09 |
| HLYAQA | | | | | HLYAQA | | | | |
| QTMNVQ | | | | | QSAPVQ | | | | |
| N | | | | | N | | | | |
| PLNGAV | 246 | 0.323 | 1.885 | 34.16 | PLNGAV | 745 | 0.275 | 0.514 | 0.19 |
| HLYAQA | | | | | HLYAQA | | | | |
| QTSTVQ | | | | | KTGWVK | | | | |
| N | | | | | N | | | | |
| PLNGAV | 247 | 0.712 | 1.882 | 12.43 | PLNGSV | 746 | 0.680 | 0.513 | 0.09 |
| HLYAQA | | | | | HLYAQA | | | | |
| QVKPVQ | | | | | QTLGVQ | | | | |
| N | | | | | N | | | | |
| PLNGAV | 248 | 0.627 | 1.878 | 24.91 | PLKGAV | 747 | 0.626 | 0.512 | 0.09 |
| HLYAQA | | | | | HLYAQA | | | | |
| QASPVQ | | | | | QLAPVQ | | | | |
| N | | | | | N | | | | |
| PLNGAV | 249 | 0.447 | 1.873 | 23.27 | PLNGSV | 748 | 0.207 | 0.512 | 1.17 |
| HLYAQA | | | | | HLYAQA | | | | |
| QVAAVQ | | | | | QTGWVQ | | | | |
| N | | | | | K | | | | |
| PLNGAV | 250 | 0.692 | 1.869 | 8.74 | PLNGAV | 749 | 0.295 | 0.511 | 0.28 |
| HLYAQA | | | | | HLYAQA | | | | |
| QLKSVQ | | | | | QTGGVQ | | | | |
| N | | | | | I | | | | |
| PLNGAV | 251 | 0.834 | 1.855 | 8.09 | PLNGAV | 750 | 0.440 | 0.510 | 0.37 |
| HLYAQA | | | | | HLYAQP | | | | |
| QIAAVQ | | | | | QTGWVQ | | | | |
| N | | | | | T | | | | |
| PLNGAV | 252 | 0.115 | 1.850 | 26.78 | PLNGAV | 751 | 0.196 | 0.508 | 4.02 |
| HLYAQA | | | | | HLYAQA | | | | |
| QTAAVQ | | | | | QTGWVL | | | | |
| N | | | | | N | | | | |
| PLNGAV | 253 | 0.742 | 1.850 | 10.05 | PLNGAV | 752 | 0.611 | 0.507 | 0.14 |
| HLYAQA | | | | | HLYDQA | | | | |
| QTKAVQ | | | | | QLTPVQ | | | | |
| N | | | | | N | | | | |
| PLNGAV | 254 | 0.223 | 1.848 | 0.09 | QLNGAV | 753 | 0.558 | 0.507 | 0.28 |
| HLYAQA | | | | | HLYAQA | | | | |
| QTGSVQ | | | | | QTATVQ | | | | |
| S | | | | | N | | | | |
| PLNGAV | 255 | 0.518 | 1.845 | 7.66 | PLNGAV | 754 | 0.359 | 0.505 | 0.19 |
| HLYAQA | | | | | HLYAQA | | | | |
| QVSNVQ | | | | | QTAWGQ | | | | |
| N | | | | | N | | | | |
| PLNGAV | 25€ | 0.690 | 1.834 | 38.65 | PLNGAV | 755 | 0.273 | 0.505 | 6.78 |
| HLYAQA | | | | | HLYAQA | | | | |
| QTAPVQ | | | | | QTGWVH | | | | |
| N | | | | | N | | | | |
| PLNGAV | 257 | 0.740 | 1.833 | 28.13 | PLKGAV | 756 | 0.556 | 0.505 | 0.09 |
| HLYAQA | | | | | HLYAQA | | | | |
| QLMPVQ | | | | | QSSPVQ | | | | |
| N | | | | | N | | | | |
| PLNGAV | 258 | 0.798 | 1.824 | 8.88 | PLNGAV | 757 | 0.374 | 0.505 | 0.09 |
| HLYAQA | | | | | HLYAQA | | | | |
| QLHPVQ | | | | | QLGSVQ | | | | |
| N | | | | | T | | | | |
| PLNGAV | 259 | 0.793 | 1.823 | 5.09 | PLNGAV | 758 | 0.656 | 0.505 | 7.62 |
| HLYAQA | | | | | HLYAQA | | | | |
| QRAQVQ | | | | | QSANVQ | | | | |
| N | | | | | N | | | | |
| PLNGAV | 260 | 0.871 | 1.823 | 1.92 | PLNGGV | 759 | 0.866 | 0.503 | 23.27 |
| HLYAQA | | | | | HLYAQA | | | | |
| QLTNVQ | | | | | QTGSVQ | | | | |
| N | | | | | N | | | | |
| PLNGAV | 261 | 0.766 | 1.822 | 13.18 | PLNGAV | 760 | 0.433 | 0.503 | 0.09 |
| HLYAQA | | | | | HLYDQA | | | | |
| QRTTVQ | | | | | QRSSVQ | | | | |
| N | | | | | N | | | | |
| PLNGAV | 262 | 0.700 | 1.821 | 17.9 | PLNGAV | 761 | 0.164 | 0.502 | 0.19 |
| HLYAQA | | | | | HLYAQA | | | | |
| QTSVVQ | | | | | QTGGVQ | | | | |
| N | | | | | D | | | | |
| SLNGAV | 263 | 0.867 | 1.819 | 0.14 | PLNGAV | 762 | 0.271 | 0.502 | 0.09 |
| HLYAQA | | | | | HLYAQA | | | | |
| QTMSVQ | | | | | QTMAVK | | | | |
| N | | | | | N | | | | |
| ALNGAV | 264 | 0.672 | 1.818 | 0.09 | PLNGAV | 763 | 0.325 | 0.501 | 0.23 |
| HLYAQA | | | | | HLYAQA | | | | |
| QTLAVQ | | | | | QTASVK | | | | |
| N | | | | | N | | | | |
| PLNGAV | 265 | 0.736 | 1.816 | 12.2 | PLNGAV | 764 | 0.531 | 0.501 | 0.14 |
| HLYAQA | | | | | HLYAQA | | | | |
| QRMSVQ | | | | | QSSPVQ | | | | |
| N | | | | | K | | | | |
| ALNGAV | 266 | 0.342 | 1.813 | 0.14 | PLNGAV | 765 | 0.275 | 0.499 | 21.68 |
| HLYAQA | | | | | HLYAQA | | | | |
| QLTPVQ | | | | | QTGWVK | | | | |
| N | | | | | N | | | | |
| PLNGAV | 267 | 0.785 | 1.807 | 3.65 | ALNGAV | 766 | 0.735 | 0.499 | 25.05 |
| HLYAQA | | | | | HLYAQA | | | | |
| QVGNVQ | | | | | QTGGVQ | | | | |
| N | | | | | N | | | | |
| PLNGAV | 268 | 0.615 | 1.805 | 4.91 | PLNGAV | 767 | 0.676 | 0.498 | 0.09 |
| HLYAQA | | | | | HLYAQA | | | | |
| QLMQVQ | | | | | QTGTVQ | | | | |
| N | | | | | T | | | | |
| PLNGSV | 269 | 0.550 | 1.795 | 0.09 | PLNGAV | 768 | 0.476 | 0.495 | 7.43 |
| HLYAQA | | | | | HLYAQA | | | | |
| QTAQVQ | | | | | QTGWVQ | | | | |
| N | | | | | I | | | | |
| PLNGAV | 270 | 0.544 | 1.793 | 24.12 | PINGAV | 769 | 0.382 | 0.494 | 0.09 |
| HLYAQA | | | | | HLYAQA | | | | |
| QTATVQ | | | | | QTSLVQ | | | | |
| N | | | | | N | | | | |
| PLNGAV | 271 | 0.727 | 1.790 | 7.8 | PLNGAV | 770 | 0.502 | 0.492 | 0.09 |
| HLYAQA | | | | | HIYAQA | | | | |
| QVHPVQ | | | | | QVAQVQ | | | | |
| N | | | | | N | | | | |
| PLNGAV | 272 | 0.836 | 1.771 | 0.09 | PLNGAV | 771 | 0.279 | 0.491 | 0.19 |
| HLYAQA | | | | | HLYAQA | | | | |
| QVSPVQ | | | | | QTVWVK | | | | |
| T | | | | | N | | | | |
| PLNGAV | 273 | 0.638 | 1.766 | 9.11 | TLNGAV | 772 | 0.827 | 0.491 | 0.09 |
| HLYAQA | | | | | HLYAQA | | | | |
| QISSVQ | | | | | QLMPVQ | | | | |
| N | | | | | N | | | | |
| PLNGAV | 274 | 0.333 | 1.765 | 62.16 | PLNGAV | 773 | 0.672 | 0.490 | 0.09 |
| HLYAQA | | | | | HIYAQA | | | | |
| QVASVQ | | | | | QTAPVQ | | | | |
| N | | | | | N | | | | |
| PLNGAV | 275 | 0.347 | 1.757 | 0.09 | PLYGAV | 774 | 0.240 | 0.488 | 0.09 |
| HLYAQA | | | | | HLYAQA | | | | |
| QTRWDQ | | | | | QTASVQ | | | | |
| N | | | | | N | | | | |
| PLNGAV | 276 | 0.508 | 1.750 | 8.88 | TLNGAV | 775 | 0.643 | 0.488 | 0.09 |
| HLYAQA | | | | | HLYAQA | | | | |
| QTMTVQ | | | | | QLGPVQ | | | | |
| N | | | | | N | | | | |
| PLNGAV | 277 | 0.551 | 1.747 | 34.21 | PLDGAV | 776 | 0.637 | 0.487 | 0.42 |
| HLYAQA | | | | | HLYAQA | | | | |
| QRSSVQ | | | | | QTGWVK | | | | |
| N | | | | | N | | | | |
| PLNGGV | 278 | 0.547 | 1.743 | 0.09 | PLKGAV | 777 | 0.669 | 0.487 | 0.14 |
| HLYAQA | | | | | HLYAQA | | | | |
| QTGWVR | | | | | QVSPVQ | | | | |
| N | | | | | N | | | | |
| PLNGAV | 279 | 0.281 | 1.741 | 213 | PLNGAV | 778 | 0.563 | 0.486 | 9.95 |
| HLYAQA | | | | | HLYAQA | | | | |
| QTAWVQ | | | | | QSQQVQ | | | | |
| N | | | | | N | | | | |
| PLNGSV | 280 | 0.130 | 1.734 | 0.28 | PLNGAV | 779 | 0.497 | 0.484 | 0.09 |
| HLYAQA | | | | | DLYAQA | | | | |
| QPGWVQ | | | | | QLSPVQ | | | | |
| Z | | | | | N | | | | |
| ALNGAV | 281 | 0.238 | 1.724 | 0.09 | PLNGAV | 780 | 0.506 | 0.484 | 0.09 |
| HLYAQA | | | | | HLYAQA | | | | |
| QTGWAQ | | | | | QVGSVQ | | | | |
| N | | | | | T | | | | |
| PLNGAV | 282 | 0.791 | 1.724 | 8.93 | PLNGTV | 781 | 0.405 | 0.483 | 0.14 |
| HLYAQA | | | | | HLYAQA | | | | |
| QRTGVQ | | | | | QTGWAQ | | | | |
| N | | | | | N | | | | |
| ALNGAV | 283 | 0.370 | 1.720 | 0.09 | ALNGAV | 782 | 0.283 | 0.482 | 0.09 |
| HLYAQA | | | | | HLYAQA | | | | |
| QTGWVQ | | | | | QTGLVQ | | | | |
| S | | | | | T | | | | |
| PLNGAV | 284 | 0.561 | 1.701 | 22.34 | PLNGAV | 783 | 0.562 | 0.482 | 35.42 |
| HLYAQA | | | | | HLYAQA | | | | |
| QVATVQ | | | | | QSSMVQ | | | | |
| N | | | | | N | | | | |
| PLNGAV | 285 | 0.480 | 1.700 | 16.68 | PLNGAV | 784 | 0.484 | 0.481 | 0.09 |
| HLYAQA | | | | | HLYAKA | | | | |
| QVTSVQ | | | | | QTAGVQ | | | | |
| N | | | | | N | | | | |
| PLNGAV | 286 | 0.313 | 1.699 | 74.78 | PLNGAV | 785 | 0.516 | 0.480 | 0.09 |
| HLYAQA | | | | | HLYAHA | | | | |
| QVSSVQ | | | | | QTGWVQ | | | | |
| N | | | | | K | | | | |
| PLNGSV | 287 | 0.353 | 1.683 | 0.14 | PLNGAV | 786 | 0.502 | 0.479 | 0.23 |
| HLYAQA | | | | | HLYAQA | | | | |
| QTSSVQ | | | | | QTSPVQ | | | | |
| N | | | | | K | | | | |
| PLNGAV | 288 | 0.348 | 1.682 | 18.83 | PLNGAV | 787 | 0.841 | 0.477 | 7.66 |
| HLYAQA | | | | | HLYAQA | | | | |
| QTNSVQ | | | | | QAVGVQ | | | | |
| N | | | | | N | | | | |
| PLNGAV | 289 | 0.815 | 1.681 | 6.03 | PLNGAV | 788 | 0.438 | 0.477 | 0.09 |
| HLYAQA | | | | | PLYAQA | | | | |
| QVKAVQ | | | | | QTGWGQ | | | | |
| N | | | | | N | | | | |
| PLNGAV | 290 | 0.689 | 1.666 | 19.02 | PLNGTV | 789 | 0.495 | 0.477 | 0.09 |
| HLYAQA | | | | | HLYAQA | | | | |
| QSGPVQ | | | | | QLGSVQ | | | | |
| N | | | | | N | | | | |
| PLNGAV | 291 | 0.660 | 1.663 | 25.61 | QLNGAV | 790 | 0.645 | 0.476 | 0.75 |
| HLYAQA | | | | | HLYAQA | | | | |
| QTGPVQ | | | | | QTGWVQ | | | | |
| N | | | | | H | | | | |
| PLNGAV | 292 | 0.537 | 1.660 | 22.9 | PLNGSV | 791 | 0.175 | 0.475 | 1.4 |
| HLYAQA | | | | | HLYAQA | | | | |
| QTAMVQ | | | | | QTGWVK | | | | |
| N | | | | | N | | | | |
| PLNGAV | 293 | 0.358 | 1.628 | 32.11 | PLNGAV | 792 | 0.812 | 0.475 | 0.09 |
| HLYAQA | | | | | HLYDQA | | | | |
| QTQPVQ | | | | | QVAPVQ | | | | |
| N | | | | | N | | | | |
| PLNGSV | 294 | 0.533 | 1.625 | 32.76 | PLNGAV | 793 | 0.460 | 0.473 | 0.19 |
| HLYAQA | | | | | NLYAQA | | | | |
| QTGSVQ | | | | | QVSSVQ | | | | |
| N | | | | | N | | | | |
| PLNGAV | 295 | 0.519 | 1.625 | 14.44 | PLNGAV | 794 | 0.646 | 0.472 | 0.09 |
| HLYAQA | | | | | HLYAQA | | | | |
| QTQQVQ | | | | | QTLPVQ | | | | |
| N | | | | | K | | | | |
| PLNGAV | 296 | 0.824 | 1.620 | 9.86 | PLNGSV | 795 | 0.337 | 0.469 | 0.93 |
| HLYAQA | | | | | HLYAQA | | | | |
| QVSRVQ | | | | | QTASVQ | | | | |
| N | | | | | N | | | | |
| QLNGAV | 297 | 0.436 | 1.617 | 0.09 | ALNGAV | 796 | 0.294 | 0.468 | 0.37 |
| HLYAQA | | | | | HLYAQA | | | | |
| QVLPVQ | | | | | QTGWGQ | | | | |
| N | | | | | N | | | | |
| PLNGAV | 298 | 0.266 | 1.610 | 0.14 | PLNGAV | 797 | 0.286 | 0.468 | 7.48 |
| HLYAQA | | | | | HLYAQA | | | | |
| QTGWVQ | | | | | QTGWGQ | | | | |
| P | | | | | N | | | | |
| QLNGAV | 299 | 0.776 | 1.609 | 0.09 | PLNGAA | 798 | 0.451 | 0.467 | 0.09 |
| HLYAQA | | | | | HLYAQA | | | | |
| QLGSVQ | | | | | QTSPVQ | | | | |
| N | | | | | N | | | | |
| PLNGAV | 300 | 0.360 | 1.604 | 40.29 | PLNGAV | 799 | 0.646 | 0.465 | 0.14 |
| HLYAQA | | | | | HLYAQA | | | | |
| QVSAVQ | | | | | QTGRVQ | | | | |
| N | | | | | H | | | | |
| PLNGAV | 301 | 0.593 | 1.604 | 7.8 | PINGAV | 800 | 0.768 | 0.464 | 0.09 |
| HLYAQA | | | | | HLYAQA | | | | |
| QVLSVQ | | | | | QTGWVQ | | | | |
| N | | | | | S | | | | |
| PLNGAV | 302 | 0.861 | 1.601 | 5.05 | PLNGAV | 801 | 0.454 | 0.464 | 2.24 |
| HLYAQA | | | | | HLYAQA | | | | |
| QTQHVQ | | | | | QTP SV | | | | |
| N | | | | | QN | | | | |
| PLNGAV | 303 | 0.113 | 1.590 | 52.72 | PLNGAV | 802 | 0.450 | 0.464 | 0.09 |
| HLYAQA | | | | | HLYDQA | | | | |
| QLASVQ | | | | | QTTAVQ | | | | |
| N | | | | | N | | | | |
| PLNGAV | 304 | 0.649 | 1.581 | 8.83 | PLNGNV | 803 | 0.415 | 0.462 | 0.09 |
| HLYAQA | | | | | HLYAQA | | | | |
| QQAPVQ | | | | | QTGWVQ | | | | |
| N | | | | | K | | | | |
| PLNGAV | 305 | 0.577 | 1.574 | 3.08 | PLNGAV | 804 | 0.167 | 0.462 | 2.62 |
| HLYAQA | | | | | HLYAQA | | | | |
| QNAQVQ | | | | | QTGWVE | | | | |
| N | | | | | N | | | | |
| PLNGAV | 306 | 0.760 | 1.567 | 12.81 | PLNGAV | 805 | 0.371 | 0.461 | 0.19 |
| HLYAQA | | | | | NLYAQA | | | | |
| QATPVQ | | | | | QTTPVQ | | | | |
| N | | | | | N | | | | |
| PLNGAV | 307 | 0.544 | 1.567 | 28.13 | PLNGAV | 806 | 0.489 | 0.461 | 0.09 |
| HLYAQA | | | | | NLYAQA | | | | |
| QVQPVQ | | | | | QLSQVQ | | | | |
| N | | | | | N | | | | |
| PLNGAV | 308 | 0.537 | 1.563 | 33.13 | SLNGAV | 807 | 0.263 | 0.460 | 0.14 |
| HLYAQA | | | | | HLYAQA | | | | |
| QTTAVQ | | | | | QVMSVQ | | | | |
| N | | | | | N | | | | |
| PLNGAV | 309 | 0.455 | 1.561 | 3.46 | QLNGAV | 808 | 0.622 | 0.458 | 0.33 |
| HLYAQA | | | | | HLYAQA | | | | |
| QTGWVR | | | | | QTGWVQ | | | | |
| N | | | | | S | | | | |
| PLNGAV | 310 | 0.357 | 1.561 | 21.83 | PINGAV | 809 | 0.534 | 0.457 | 0.19 |
| HLYAQA | | | | | HLYAQA | | | | |
| QLAAVQ | | | | | QTGWFQ | | | | |
| N | | | | | N | | | | |
| PLNGAV | 311 | 0.418 | 1.555 | 0.09 | PLNGDV | 810 | 0.419 | 0.456 | 0.14 |
| HLYAQA | | | | | HLYAQA | | | | |
| QTSPDQ | | | | | QVSSVQ | | | | |
| N | | | | | N | | | | |
| PLNGAV | 312 | 0.393 | 1.553 | 16.36 | PLNGGV | 811 | 0.482 | 0.456 | 0.28 |
| HLYAQA | | | | | HLYAQA | | | | |
| QRSGVQ | | | | | QTGWVQ | | | | |
| N | | | | | S | | | | |
| PLNGAV | 313 | 0.218 | 1.551 | 0.65 | PLNGAV | 812 | 0.559 | 0.456 | 0.09 |
| HLYAQA | | | | | NLYAQA | | | | |
| QTGGVQ | | | | | QRSTVQ | | | | |
| T | | | | | N | | | | |
| PLNGAV | 314 | 0.274 | 1.546 | 0.93 | ALNGAV | 813 | 0.298 | 0.455 | 0.14 |
| HLYAQA | | | | | HLYAQA | | | | |
| QTGWVP | | | | | QTGWVQ | | | | |
| N | | | | | Y | | | | |
| PLDSAV | 315 | 0.833 | 1.539 | 10.89 | PLNGAV | 814 | 0.170 | 0.455 | 0.09 |
| HLYAQA | | | | | HHYAQA | | | | |
| QTGWVQ | | | | | QTAAVQ | | | | |
| N | | | | | N | | | | |
| PLNGAV | 316 | 0.496 | 1.537 | 0.09 | PLNGAV | 815 | 0.346 | 0.454 | 0.09 |
| HLYAQA | | | | | HRYAQA | | | | |
| QTTPVQ | | | | | QTGWVQ | | | | |
| T | | | | | H | | | | |
| PLNGAV | 317 | 0.540 | 1.535 | 7.94 | QLNGAV | 816 | 0.627 | 0.453 | 0.37 |
| HLYAQA | | | | | HLYAQA | | | | |
| QLMAVQ | | | | | QTGWVH | | | | |
| N | | | | | N | | | | |
| PLNGAV | 318 | 0.596 | 1.532 | 36.69 | PLNGAV | 817 | 0.861 | 0.452 | 56.6 |
| HLYAQA | | | | | HLYAQA | | | | |
| QTMPVQ | | | | | QRGWVQ | | | | |
| N | | | | | N | | | | |
| PLNGAV | 319 | 0.391 | 1.529 | 0.09 | PLNGAV | 818 | 0.233 | 0.450 | 0.14 |
| HHYAQA | | | | | HLYAQA | | | | |
| QTSPVQ | | | | | QTGSVE | | | | |
| N | | | | | N | | | | |
| PLNGAV | 320 | 0.756 | 1.527 | 7.8 | ALNGAV | 819 | 0.249 | 0.450 | 0.37 |
| HLYAQA | | | | | HLYAQA | | | | |
| QLANVQ | | | | | QTGWVH | | | | |
| N | | | | | N | | | | |
| PLNGAV | 321 | 0.606 | 1.520 | 11.68 | PLNGAV | 820 | 0.494 | 0.449 | 0.09 |
| HLYAQA | | | | | NLYAQA | | | | |
| QVSTVQ | | | | | QTLAVQ | | | | |
| N | | | | | N | | | | |
| PLNGAV | 322 | 0.602 | 1.518 | 12.9 | PLNGAV | 821 | 0.772 | 0.448 | 91.93 |
| HLYAQA | | | | | HLYAQA | | | | |
| QSAQVQ | | | | | QSSLVQ | | | | |
| N | | | | | N | | | | |
| PLNGAV | 323 | 0.838 | 1.508 | 8.13 | ALNGAV | 822 | 0.203 | 0.448 | 0.37 |
| HLYAQA | | | | | HLYAQA | | | | |
| QNTPVQ | | | | | QTGWLQ | | | | |
| N | | | | | N | | | | |
| PLNGAV | 324 | 0.381 | 1.495 | 0.09 | TLNGAV | 823 | 0.736 | 0.448 | 0.09 |
| HLYAQA | | | | | HLYAQA | | | | |
| QVSSVQ | | | | | QTLQVQ | | | | |
| T | | | | | N | | | | |
| PLNGAV | 325 | 0.284 | 1.492 | 0.09 | PLNGAV | 824 | 0.439 | 0.448 | 0.09 |
| HLYAQA | | | | | HLYDQA | | | | |
| QTVSVK | | | | | QVQSVQ | | | | |
| N | | | | | N | | | | |
| PLNGAV | 326 | 0.710 | 1.488 | 9.21 | SLNGAV | 825 | 0.442 | 0.447 | 0.09 |
| HLYAQP | | | | | HLYAQA | | | | |
| QTGLVQ | | | | | QVTGVQ | | | | |
| N | | | | | N | | | | |
| PLNGAV | 327 | 0.287 | 1.487 | 621.2 | QLNGAV | 826 | 0.849 | 0.444 | 0.09 |
| HLYAQA | | | | | HLYAQA | | | | |
| QTGSVQ | | | | | QSAVVQ | | | | |
| N | | | | | N | | | | |
| SLNGAV | 328 | 0.437 | 1.485 | 0.09 | PLNGVV | 827 | 0.410 | 0.444 | 0.09 |
| HLYAQA | | | | | HLYAQA | | | | |
| QTLPVQ | | | | | QTGWVQ | | | | |
| N | | | | | T | | | | |
| PLNGAV | 329 | 0.440 | 1.478 | 0.09 | PLNGAV | 828 | 0.373 | 0.444 | 0.61 |
| HLYAQA | | | | | HLYAQA | | | | |
| QTGGAQ | | | | | QTAWVK | | | | |
| N | | | | | N | | | | |
| SLNGAV | 330 | 0.618 | 1.477 | 0.09 | TLNGAV | 829 | 0.557 | 0.443 | 0.14 |
| HLYAQA | | | | | HLYAQA | | | | |
| QTAQVQ | | | | | QTLPVQ | | | | |
| N | | | | | N | | | | |
| PLNGAV | 331 | 0.684 | 1.466 | 14.21 | ALNGAV | 830 | 0.683 | 0.442 | 0.09 |
| HLYAQA | | | | | HLYAQA | | | | |
| QTAVVQ | | | | | QTTGVQ | | | | |
| N | | | | | N | | | | |
| PLNGAV | 332 | 0.533 | 1.456 | 17.71 | PLNGAV | 831 | 0.466 | 0.442 | 0.09 |
| HLYAQA | | | | | HLYAKA | | | | |
| QRLGVQ | | | | | QTMAVQ | | | | |
| N | | | | | N | | | | |
| PLNGSV | 333 | 0.207 | 1.453 | 0.37 | PLNGAV | 832 | 0.636 | 0.442 | 10.61 |
| HLYAQA | | | | | HLYAQA | | | | |
| QTGWVQ | | | | | QTYSVQ | | | | |
| H | | | | | N | | | | |
| PLNGAV | 334 | 0.489 | 1.452 | 21.26 | PLNGCV | 833 | 0.285 | 0.441 | 0.75 |
| HLYAQA | | | | | HLYAQA | | | | |
| QRTLVQ | | | | | QTGWVQ | | | | |
| N | | | | | N | | | | |
| SLNGAV | 335 | 0.559 | 1.451 | 0.09 | PLNGAV | 834 | 0.491 | 0.440 | 0.09 |
| HLYAQA | | | | | HLYAQA | | | | |
| QTMAVQ | | | | | QLAAVQ | | | | |
| Z | | | | | T | | | | |
| PLNGAV | 336 | 0.707 | 1.447 | 10.23 | PLNGAV | 835 | 0.734 | 0.440 | 0.14 |
| HLYAQA | | | | | HLYAQA | | | | |
| QTQMVQ | | | | | QTALVK | | | | |
| N | | | | | N | | | | |
| PLNGAV | 337 | 0.663 | 1.442 | 10.52 | PLNGAV | 836 | 0.392 | 0.439 | 0.14 |
| HLYAQA | | | | | HLYAKA | | | | |
| QITPVQ | | | | | QTVAVQ | | | | |
| N | | | | | N | | | | |
| PLNGAV | 338 | 0.199 | 1.434 | 0.09 | PLNGAV | 837 | 0.225 | 0.439 | 0.37 |
| HLYAQA | | | | | HLYAHA | | | | |
| QTVWVQ | | | | | QTGWVQ | | | | |
| K | | | | | T | | | | |
| PLNGAV | 339 | 0.584 | 1.423 | 13.97 | PLNGGV | 838 | 0.649 | 0.439 | 0.09 |
| HLYAQA | | | | | HLYAQA | | | | |
| QRSAVQ | | | | | QRGSVQ | | | | |
| N | | | | | N | | | | |
| PLNGAV | 340 | 0.332 | 1.420 | 99.87 | PLNGAF | 839 | 0.462 | 0.436 | 0.14 |
| HLYAQA | | | | | HLYAQA | | | | |
| QTASVQ | | | | | QTGGVQ | | | | |
| N | | | | | N | | | | |
| PLNGAV | 341 | 0.536 | 1.417 | 11.22 | PLNGAV | 840 | 0.496 | 0.436 | 0.09 |
| HLYAQA | | | | | HLYALA | | | | |
| QTMGVQ | | | | | QTSPVQ | | | | |
| N | | | | | N | | | | |
| PLNGAV | 342 | 0.256 | 1.414 | 0.28 | PLNGAV | 841 | 0.225 | 0.435 | 2.9 |
| HLYAQA | | | | | HLYAQA | | | | |
| QTGGVQ | | | | | QTGWVQ | | | | |
| H | | | | | Y | | | | |
| PLNGAV | 343 | 0.415 | 1.412 | 36.36 | PLNGAV | 842 | 0.538 | 0.432 | 0.19 |
| HLYAQA | | | | | HLYAQA | | | | |
| QVQSVQ | | | | | QTLPVQ | | | | |
| N | | | | | T | | | | |
| PLNGAV | 344 | 0.324 | 1.411 | 500.1 | PLNGAV | 843 | 0.499 | 0.432 | 0.23 |
| HLYAQA | | | | | HLYSQA | | | | |
| QTGGVQ | | | | | QTGWFQ | | | | |
| N | | | | | N | | | | |
| SLNGAV | 345 | 0.471 | 1.411 | 0.09 | PLNGAV | 844 | 0.696 | 0.432 | 0.33 |
| HLYAQA | | | | | HLYAQA | | | | |
| QTAPVQ | | | | | QTGLVQ | | | | |
| N | | | | | H | | | | |
| PLNGAV | 346 | 0.680 | 1.410 | 16.68 | PLNGAV | 845 | 0.628 | 0.432 | 0.98 |
| HLYAQA | | | | | HLYAQA | | | | |
| QISPVQ | | | | | QTP TV | | | | |
| N | | | | | QN | | | | |
| PLNGAV | 347 | 0.345 | 1.409 | 0.09 | PLYGAV | 846 | 0.274 | 0.429 | 0.28 |
| HLYAQP | | | | | HLYAQA | | | | |
| QTGWVK | | | | | QTAWVQ | | | | |
| N | | | | | N | | | | |
| PLNGAV | 348 | 0.242 | 1.409 | 0.14 | PLNGAV | 847 | 0.275 | 0.428 | 0.23 |
| HLYAQA | | | | | HLYAKA | | | | |
| QTGSAQ | | | | | QTASVQ | | | | |
| N | | | | | N | | | | |
| PLNGAV | 349 | 0.474 | 1.393 | 2.62 | PLNGAV | 848 | 0.285 | 0.428 | 0.19 |
| HLYAQA | | | | | HLYAQA | | | | |
| QTGWAQ | | | | | QTASVQ | | | | |
| N | | | | | K | | | | |
| PLNGAV | 350 | 0.383 | 1.392 | 0.09 | PLDGSV | 849 | 0.641 | 0.424 | 0.09 |
| HLYAQA | | | | | HLYAQA | | | | |
| QTMSVQ | | | | | QTAWVQ | | | | |
| T | | | | | N | | | | |
| PLNGSV | 351 | 0.649 | 1.391 | 12.29 | PLNGAD | 850 | 0.540 | 0.423 | 0.09 |
| HLYAQA | | | | | HLYAQA | | | | |
| QTAWVQ | | | | | QTSSVQ | | | | |
| N | | | | | N | | | | |
| PLNGAV | 352 | 0.410 | 1.387 | 8.13 | PLNGAV | 851 | 0.594 | 0.422 | 0.09 |
| HLYAQA | | | | | HLYAQA | | | | |
| QVGGVQ | | | | | QTSPVQ | | | | |
| N | | | | | I | | | | |
| PLNGAV | 353 | 0.496 | 1.387 | 0.09 | PLNGAV | 852 | 0.661 | 0.420 | 40 |
| HLYAKA | | | | | HLYAQA | | | | |
| QTSPVQ | | | | | QIGWVQ | | | | |
| N | | | | | N | | | | |
| PLNGAV | 354 | 0.768 | 1.381 | 0.09 | PLNGAV | 853 | 0.209 | 0.419 | 0.09 |
| HLYAQA | | | | | HLYAKA | | | | |
| QLAPVQ | | | | | QTSTVQ | | | | |
| T | | | | | N | | | | |
| PLDGAV | 355 | 0.901 | 1.375 | 0.09 | PLNGAV | 854 | 0.237 | 0.419 | 0.19 |
| HLYAQA | | | | | HRYAQA | | | | |
| QTALVQ | | | | | QTGWVQ | | | | |
| N | | | | | T | | | | |
| PLNGAV | 356 | 0.594 | 1.368 | 58.98 | PLNGAV | 855 | 0.268 | 0.419 | 0.14 |
| HLYAQA | | | | | HLYDQA | | | | |
| QTALVQ | | | | | QTSTVQ | | | | |
| N | | | | | N | | | | |
| PLNGAV | 357 | 0.470 | 1.366 | 19.63 | QLNGAV | 856 | 0.568 | 0.418 | 69.31 |
| HLYAQA | | | | | HLYAQA | | | | |
| QLAGVQ | | | | | QTGLVQ | | | | |
| N | | | | | N | | | | |
| PLNGAV | 358 | 0.613 | 1.365 | 9.53 | PLNGAV | 857 | 0.864 | 0.417 | 0.09 |
| HLYAQA | | | | | NLYAQA | | | | |
| QRTAVQ | | | | | QLGPVQ | | | | |
| N | | | | | N | | | | |
| PLNGAV | 359 | 0.540 | 1.363 | 22.15 | PLNGAV | 858 | 0.400 | 0.417 | 0.23 |
| HLYAQA | | | | | HLYAQA | | | | |
| QRSPVQ | | | | | QTGWDK | | | | |
| N | | | | | N | | | | |
| PLNGAV | 360 | 0.513 | 1.360 | 39.82 | PLNGAL | 859 | 0.432 | 0.416 | 0.14 |
| HLYAQA | | | | | HLYAQA | | | | |
| QTLAVQ | | | | | QTGWVK | | | | |
| N | | | | | N | | | | |
| PLNGAV | 361 | 0.322 | 1.351 | 5.42 | PLNGNV | 860 | 0.698 | 0.414 | 0.09 |
| HLYAQA | | | | | HLYAHA | | | | |
| QLAHVQ | | | | | QTGWVQ | | | | |
| N | | | | | N | | | | |
| PLNGAV | 362 | 0.352 | 1.348 | 36.69 | PLNGAV | 861 | 0.861 | 0.414 | 8.23 |
| HLYAQA | | | | | HLYAQA | | | | |
| QTSLVQ | | | | | QKSSVQ | | | | |
| N | | | | | N | | | | |
| PLNGAV | 363 | 0.548 | 1.347 | 30.75 | PLNGAV | 862 | 0.691 | 0.412 | 30.7 |
| HLYAQA | | | | | HLYAQA | | | | |
| QRLSVQ | | | | | QTGYVQ | | | | |
| N | | | | | N | | | | |
| PLNGAV | 364 | 0.406 | 1.344 | 0.09 | PVNGAV | 863 | 0.456 | 0.412 | 0.09 |
| HLYDQA | | | | | HLYAQA | | | | |
| QLSPVQ | | | | | QVGSVQ | | | | |
| N | | | | | N | | | | |
| PLNGAV | 365 | 0.424 | 1.339 | 13.97 | PLNGGV | 864 | 0.536 | 0.411 | 1.17 |
| HLYAQA | | | | | HLYAQA | | | | |
| QLMGVQ | | | | | QTGWVK | | | | |
| N | | | | | N | | | | |
| PLNGSV | 366 | 0.147 | 1.336 | 1.03 | PLNGAV | 865 | 0.627 | 0.410 | 0.09 |
| HLYAQA | | | | | HLYAQA | | | | |
| QTGWVQ | | | | | QRGWVQ | | | | |
| T | | | | | T | | | | |
| PLNGAV | 367 | 0.588 | 1.335 | 11.26 | PLNGAV | 866 | 0.729 | 0.410 | 0.09 |
| HLYAQA | | | | | NLYAQA | | | | |
| QSMQVQ | | | | | QRSLVQ | | | | |
| N | | | | | N | | | | |
| PLNGGV | 368 | 0.483 | 1.334 | 0.14 | PINGAV | 867 | 0.358 | 0.410 | 0.51 |
| HLYAQA | | | | | HLYAQA | | | | |
| QTGWFQ | | | | | QTGWDQ | | | | |
| N | | | | | N | | | | |
| PLNGAV | 369 | 0.834 | 1.326 | 14.02 | PLNGNV | 868 | 0.536 | 0.410 | 0.23 |
| HLYAQA | | | | | HLYAQA | | | | |
| QTQTVQ | | | | | QTGWVQ | | | | |
| N | | | | | T | | | | |
| PLDGAV | 370 | 0.860 | 1.323 | 9.44 | PLNGAV | 869 | 0.265 | 0.409 | 0.23 |
| HLYSQA | | | | | HLYAKA | | | | |
| QTGWVQ | | | | | QTGWFQ | | | | |
| N | | | | | N | | | | |
| PLNGAV | 371 | 0.325 | 1.319 | 0.14 | PLNGAV | 870 | 0.421 | 0.408 | 0.09 |
| HLYAQA | | | | | HLYAQE | | | | |
| QTGWEQ | | | | | QTSTVQ | | | | |
| N | | | | | N | | | | |
| PLNGAV | 372 | 0.487 | 1.317 | 29.44 | PLNGAV | 871 | 0.281 | 0.406 | 0.14 |
| HLYAQA | | | | | HLYAQA | | | | |
| QVGSVQ | | | | | QTGGVE | | | | |
| N | | | | | N | | | | |
| PLNGAV | 373 | 0.339 | 1.317 | 24.86 | PLNGAV | 872 | 0.831 | 0.406 | 0.09 |
| HLYAQA | | | | | HLYSQA | | | | |
| QVSGVQ | | | | | QTGWVQ | | | | |
| N | | | | | I | | | | |
| PLNGAV | 374 | 0.767 | 1.312 | 13.04 | SLNGAV | 873 | 0.480 | 0.406 | 0.09 |
| HLYAQA | | | | | HLYAQA | | | | |
| QVMAVQ | | | | | QTGLVQ | | | | |
| N | | | | | K | | | | |
| PLNGAV | 375 | 0.814 | 1.309 | 23.37 | PLNGAV | 874 | 0.605 | 0.403 | 0.09 |
| HLYAQA | | | | | HLYAQA | | | | |
| QIGGVQ | | | | | QTGCVR | | | | |
| N | | | | | N | | | | |
| PLNGAV | 376 | 0.841 | 1.301 | 5.47 | PLNGAD | 875 | 0.758 | 0.402 | 0.09 |
| HLYAQA | | | | | HLYAQA | | | | |
| QIAGVQ | | | | | QVTPVQ | | | | |
| N | | | | | N | | | | |
| PLNGAV | 377 | 0.200 | 1.297 | 0.09 | PLNGAV | 876 | 0.129 | 0.400 | 0.28 |
| HLYAKA | | | | | HLYAPA | | | | |
| QTVSVQ | | | | | QTGWVQ | | | | |
| N | | | | | T | | | | |
| PLNGAV | 378 | 0.838 | 1.297 | 4.3 | PLNGDV | 877 | 0.900 | 0.400 | 0.09 |
| HLYSQA | | | | | HLYAQA | | | | |
| QTGRVQ | | | | | QTSAVQ | | | | |
| N | | | | | N | | | | |
| PLNGAV | 379 | 0.826 | 1.296 | 7.34 | TLNGAV | 878 | 0.635 | 0.399 | 0.09 |
| HLYAQA | | | | | HLYAQA | | | | |
| QLSHVQ | | | | | QSSLVQ | | | | |
| N | | | | | N | | | | |
| PLNGAV | 380 | 0.865 | 1.288 | 4.77 | SLNGAV | 879 | 0.645 | 0.399 | 0.14 |
| HLYAQA | | | | | HLYAQA | | | | |
| QVQTVQ | | | | | QRSVVQ | | | | |
| N | | | | | N | | | | |
| SLDGAV | 381 | 0.875 | 1.287 | 61.08 | SLNGAV | 880 | 0.817 | 0.397 | 0.33 |
| HLYAQA | | | | | HLYAQA | | | | |
| QTGWVQ | | | | | QTGWVQ | | | | |
| N | | | | | S | | | | |
| PLNGAV | 382 | 0.326 | 1.287 | 0.09 | PVNGAV | 881 | 0.800 | 0.397 | 0.14 |
| HLYAQP | | | | | HLYAQA | | | | |
| QTGWDQ | | | | | QTGWVQ | | | | |
| N | | | | | S | | | | |
| PLNGAV | 383 | 0.564 | 1.284 | 11.36 | PLNGAV | 882 | 0.619 | 0.396 | 0.09 |
| HLYAQA | | | | | HLYAQA | | | | |
| QRNSVQ | | | | | QLSPVQ | | | | |
| N | | | | | S | | | | |
| PLNGAV | 384 | 0.533 | 1.283 | 57.16 | PLNGAV | 883 | 0.285 | 0.395 | 0.09 |
| HLYAQA | | | | | HLYAQP | | | | |
| QTLPVQ | | | | | QTGWLQ | | | | |
| N | | | | | N | | | | |
| PLNGAV | 385 | 0.569 | 1.282 | 5.09 | PLNGAV | 884 | 0.719 | 0.394 | 0.14 |
| HLYAQA | | | | | NLYAQA | | | | |
| QTKQVQ | | | | | QSAPVQ | | | | |
| N | | | | | N | | | | |
| PLNGSV | 386 | 0.144 | 1.279 | 972 | PLNGTV | 885 | 0.384 | 0.394 | 0.09 |
| HLYAQA | | | | | HLYAQA | | | | |
| QTGWVQ | | | | | QTGWVP | | | | |
| Z | | | | | N | | | | |
| PLNGAV | 387 | 0.593 | 1.278 | 11.17 | PVDGAV | 886 | 0.792 | 0.394 | 0.23 |
| HLYAQA | | | | | HLYAQA | | | | |
| QLGQVQ | | | | | QTGSVQ | | | | |
| N | | | | | N | | | | |
| SLNGAV | 388 | 0.684 | 1.277 | 19.35 | PLNGAV | 887 | 0.261 | 0.393 | 0.09 |
| HLYAQA | | | | | HLYDQA | | | | |
| QTGRVQ | | | | | QTAAVQ | | | | |
| Z | | | | | N | | | | |
| PLDGAV | 389 | 0.647 | 1.275 | 263.1 | PLKGAV | 888 | 0.352 | 0.392 | 0.09 |
| HLYAQA | | | | | HLYAQA | | | | |
| QTGWVQ | | | | | QTSTVQ | | | | |
| N | | | | | N | | | | |
| PLNGSV | 390 | 0.181 | 1.273 | 0.19 | PLNGAV | 889 | 0.730 | 0.392 | 0.14 |
| HLYAQA | | | | | HLYAQA | | | | |
| QTGWAQ | | | | | QTGPVQ | | | | |
| N | | | | | T | | | | |
| TLNGAV | 391 | 0.405 | 1.266 | 0.09 | PLNGAV | 890 | 0.432 | 0.392 | 0.14 |
| HLYAQA | | | | | HLYAQA | | | | |
| QVASVQ | | | | | QTVGVQ | | | | |
| N | | | | | K | | | | |
| PLNGAV | 392 | 0.733 | 1.261 | 2.85 | PLNGAV | 891 | 0.451 | 0.391 | 0.14 |
| HLYAQA | | | | | NLYAQA | | | | |
| QNMQVQ | | | | | QTSTVQ | | | | |
| N | | | | | N | | | | |
| PLNGAV | 393 | 0.863 | 1.258 | 3.18 | PLNGAV | 892 | 0.414 | 0.390 | 0.09 |
| HLYAQA | | | | | HLYARA | | | | |
| QNVQVQ | | | | | QTVSVQ | | | | |
| N | | | | | N | | | | |
| PLNGAV | 394 | 0.299 | 1.250 | 0.14 | PLNGAV | 893 | 0.431 | 0.390 | 0.09 |
| HLYAQA | | | | | HLYAQA | | | | |
| QTGSVQ | | | | | QTASGQ | | | | |
| I | | | | | N | | | | |
| PLNGTV | 395 | 0.840 | 1.249 | 15.75 | PLNGAV | 894 | 0.631 | 0.390 | 20.28 |
| HLYAQA | | | | | HLYAQA | | | | |
| QTGGVQ | | | | | QSVSVQ | | | | |
| N | | | | | N | | | | |
| PLNGAV | 396 | 0.805 | 1.248 | 0.09 | PLNGAV | 895 | 0.724 | 0.389 | 0.09 |
| HLYAKA | | | | | HLYAQA | | | | |
| QVSPVQ | | | | | QSGPVQ | | | | |
| N | | | | | T | | | | |
| PLNGAV | 397 | 0.765 | 1.241 | 6.4 | QLNGAV | 896 | 0.578 | 0.389 | 0.47 |
| HLYAQA | | | | | HLYAQA | | | | |
| QRGGVQ | | | | | QTGWGQ | | | | |
| N | | | | | N | | | | |
| PLNGGV | 398 | 0.335 | 1.240 | 25.94 | PLNGAV | 897 | 0.670 | 0.386 | 0.09 |
| HLYAQA | | | | | HLYAQA | | | | |
| QTGLVQ | | | | | QVMSVK | | | | |
| N | | | | | N | | | | |
| PLNGAV | 399 | 0.542 | 1.237 | 33.32 | PLNGTV | 898 | 0.557 | 0.386 | 0.09 |
| HLYAQA | | | | | HLYAKA | | | | |
| QVMSVQ | | | | | QTGSVQ | | | | |
| N | | | | | N | | | | |
| PLNGAV | 400 | 0.401 | 1.235 | 15.05 | PLNGAV | 899 | 0.527 | 0.385 | 0.09 |
| HLYAQA | | | | | NLYAQA | | | | |
| QTTGVQ | | | | | QTSLVQ | | | | |
| N | | | | | N | | | | |
| PLNGAV | 401 | 0.375 | 1.229 | 0.09 | PINGAV | 900 | 0.867 | 0.385 | 0.14 |
| HLYAQA | | | | | HLYAQA | | | | |
| QLSPVQ | | | | | QTLSVQ | | | | |
| K | | | | | N | | | | |
| SLNGAV | 402 | 0.677 | 1.226 | 0.09 | PLNGAV | 901 | 0.458 | 0.384 | 0.09 |
| HLYAQA | | | | | HLYAQA | | | | |
| QTAAVQ | | | | | QLGSVQ | | | | |
| N | | | | | K | | | | |
| PINGAV | 403 | 0.351 | 1.223 | 0.14 | TLNGAV | 902 | 0.728 | 0.383 | 0.09 |
| HLYAQA | | | | | HLYAQA | | | | |
| QTSPVQ | | | | | QTAMVQ | | | | |
| N | | | | | N | | | | |
| PLNGAV | 404 | 0.691 | 1.220 | 15.28 | PLNGAV | 903 | 0.775 | 0.383 | 0.09 |
| HLYAQA | | | | | HLYAQA | | | | |
| QLSRVQ | | | | | HLSSVQ | | | | |
| N | | | | | N | | | | |
| PLNGAV | 405 | 0.259 | 1.213 | 0.09 | PLNGAV | 904 | 0.552 | 0.380 | 0.09 |
| HLYAQA | | | | | HLYAKA | | | | |
| QVSSVQ | | | | | QVMSVQ | | | | |
| K | | | | | N | | | | |
| PLNGAV | 406 | 0.768 | 1.212 | 0.09 | PLNGAV | 905 | 0.569 | 0.380 | 0.09 |
| HLYAQA | | | | | HLYAQA | | | | |
| QTAPVQ | | | | | QTGLVL | | | | |
| T | | | | | N | | | | |
| PLNGAV | 407 | 0.740 | 1.206 | 7.9 | PLNGGV | 906 | 0.491 | 0.378 | 1.03 |
| HLYAQA | | | | | HLYAQA | | | | |
| QMAPVQ | | | | | QTGWVQ | | | | |
| N | | | | | K | | | | |
| PLNGAV | 408 | 0.499 | 1.202 | 7.06 | PLNGAV | 907 | 0.250 | 0.378 | 0.61 |
| HLYAQA | | | | | HLYAKA | | | | |
| QILGVQ | | | | | QTGWVQ | | | | |
| N | | | | | K | | | | |
| PLNGAV | 409 | 0.216 | 1.198 | 0.14 | PLNGAV | 908 | 0.482 | 0.378 | 0.09 |
| HLYAQA | | | | | LLYAQA | | | | |
| QTASVQ | | | | | QTASVQ | | | | |
| T | | | | | N | | | | |
| PLNGAV | 410 | 0.267 | 1.196 | 0.23 | PLNGDV | 909 | 0.507 | 0.378 | 0.09 |
| HLYAQA | | | | | HLYAQA | | | | |
| QTGSLQ | | | | | QTMAVQ | | | | |
| N | | | | | N | | | | |
| PLNGAV | 411 | 0.638 | 1.196 | 28.79 | PLNGAV | 910 | 0.258 | 0.377 | 0.09 |
| HLYAQA | | | | | HLYAKA | | | | |
| QTGTVQ | | | | | QTAAVQ | | | | |
| N | | | | | N | | | | |
| PLNGGV | 412 | 0.578 | 1.193 | 565.1 | PLNGAV | 911 | 0.549 | 0.377 | 763.5 |
| HLYAQA | | | | | HLYAQA | | | | |
| QTGWVQ | | | | | QTGLVQ | | | | |
| N | | | | | N | | | | |
| PLNGAV | 413 | 0.237 | 1.183 | 0.89 | PLNGDV | 912 | 0.699 | 0.376 | 0.14 |
| HLYAQA | | | | | HLYAQA | | | | |
| QTGSVQ | | | | | QSSPVQ | | | | |
| T | | | | | N | | | | |
| PLNGAV | 414 | 0.353 | 1.171 | 0.09 | PLNGAV | 913 | 0.832 | 0.376 | 14.96 |
| HLYAQA | | | | | HLYAQA | | | | |
| QTSSVQ | | | | | QTSNVQ | | | | |
| T | | | | | N | | | | |
| PLNGAV | 415 | 0.414 | 1.167 | 10.84 | ALDGAV | 914 | 0.702 | 0.376 | 0.47 |
| HLYAQA | | | | | HLYAQA | | | | |
| QTSHVQ | | | | | QTGSVQ | | | | |
| N | | | | | N | | | | |
| PLNGGV | 416 | 0.561 | 1.166 | 0.28 | PLNGAV | 915 | 0.848 | 0.375 | 0.09 |
| HLYAQA | | | | | HLYSQA | | | | |
| QTGWDQ | | | | | QTSSVQ | | | | |
| N | | | | | N | | | | |
| PLNGAV | 417 | 0.753 | 1.165 | 3.55 | PLKGAV | 916 | 0.390 | 0.373 | 0.19 |
| HLYAQA | | | | | HLYAQA | | | | |
| QRIGVQ | | | | | QLSPVQ | | | | |
| N | | | | | N | | | | |
| TLNGAV | 418 | 0.771 | 1.164 | 0.09 | LLNGAV | 917 | 0.349 | 0.373 | 0.09 |
| HLYAQA | | | | | HLYAQA | | | | |
| QTTSVQ | | | | | QTVSVQ | | | | |
| N | | | | | N | | | | |
| PLNGAV | 419 | 0.347 | 1.158 | 0.14 | PLNGGV | 918 | 0.571 | 0.373 | 0.37 |
| HLYAQA | | | | | HLYAQA | | | | |
| QTGWGQ | | | | | QTGWVQ | | | | |
| T | | | | | I | | | | |
| PLNGAV | 420 | 0.549 | 1.158 | 14.3 | PLNGAV | 919 | 0.863 | 0.372 | 0.14 |
| HLYAQA | | | | | HLYSQA | | | | |
| QSAMVQ | | | | | QTGWVR | | | | |
| N | | | | | N | | | | |
| PLNGAV | 421 | 0.510 | 1.156 | 23.23 | PLNGAV | 920 | 0.426 | 0.371 | 0.09 |
| HLYAQA | | | | | HLYAQA | | | | |
| QTSMVQ | | | | | QTGWGH | | | | |
| N | | | | | N | | | | |
| PLNGAV | 422 | 0.781 | 1.148 | 13.09 | PHNGAV | 921 | 0.849 | 0.371 | 0.09 |
| HLYAQA | | | | | HLYAQA | | | | |
| QSMGVQ | | | | | QTTSVQ | | | | |
| N | | | | | N | | | | |
| PLNGAV | 423 | 0.568 | 1.145 | 27.62 | PLNRAV | 922 | 0.436 | 0.371 | 0.09 |
| HLYAQA | | | | | HLYAQA | | | | |
| QSMSVQ | | | | | QTGWVQ | | | | |
| N | | | | | K | | | | |
| PLNGAV | 424 | 0.442 | 1.145 | 94.03 | PLNGAV | 923 | 0.509 | 0.371 | 0.09 |
| HLYAQA | | | | | HLYDQA | | | | |
| QTSSVQ | | | | | QRASVQ | | | | |
| N | | | | | N | | | | |
| PLNGAV | 425 | 0.620 | 1.143 | 30.52 | PLNGAV | 924 | 0.800 | 0.370 | 584.7 |
| HLYAQA | | | | | HLYSQA | | | | |
| QTSGVQ | | | | | QTGWVQ | | | | |
| N | | | | | N | | | | |
| PLNGAV | 426 | 0.557 | 1.141 | 22.9 | PLNGSV | 925 | 0.401 | 0.370 | 0.42 |
| HLYAQA | | | | | HLYAQA | | | | |
| QTGAVQ | | | | | QTGTVQ | | | | |
| N | | | | | N | | | | |
| PLNGAV | 427 | 0.627 | 1.140 | 14.02 | PLNGAV | 926 | 0.752 | 0.370 | 0.09 |
| HLYAQA | | | | | HLYDQA | | | | |
| QVNSVQ | | | | | QTSGVQ | | | | |
| N | | | | | N | | | | |
| PLNGAV | 428 | 0.804 | 1.139 | 12.48 | PLNGAV | 927 | 0.389 | 0.368 | 0.19 |
| HLYAQA | | | | | HLYAQA | | | | |
| QVAGVQ | | | | | KTGWFQ | | | | |
| N | | | | | N | | | | |
| PLNGAV | 429 | 0.710 | 1.139 | 27.01 | KLDGAV | 928 | 0.763 | 0.367 | 0.14 |
| HLYAQA | | | | | HLYAQA | | | | |
| QIGSVQ | | | | | QTGLVQ | | | | |
| N | | | | | N | | | | |
| PLDGAV | 430 | 0.818 | 1.132 | 9.49 | PLNGAV | 929 | 0.581 | 0.363 | 9.39 |
| HVYAQA | | | | | HLYAQA | | | | |
| QTGWVQ | | | | | QSQMVQ | | | | |
| N | | | | | N | | | | |
| TLNGAV | 431 | 0.474 | 1.131 | 0.09 | TLNGAV | 930 | 0.706 | 0.363 | 0.09 |
| HLYAQA | | | | | HLYAQA | | | | |
| QTTPVQ | | | | | QTSVVQ | | | | |
| N | | | | | N | | | | |
| PLNGAV | 432 | 0.442 | 1.131 | 41.64 | PLNGAV | 931 | 0.449 | 0.361 | 0.09 |
| HLYAQA | | | | | HLYAKA | | | | |
| QLGSVQ | | | | | QTGTVQ | | | | |
| N | | | | | N | | | | |
| PLNGAV | 433 | 0.807 | 1.130 | 7.06 | PLNGAV | 932 | 0.440 | 0.361 | 0.09 |
| HLYAQA | | | | | HLYAQA | | | | |
| QVNGVQ | | | | | QTVSVH | | | | |
| N | | | | | N | | | | |
| QLNGAV | 434 | 0.857 | 1.127 | 0.19 | PLNGAV | 933 | 0.559 | 0.361 | 0.19 |
| HLYAQA | | | | | HLYAQA | | | | |
| QLSSVQ | | | | | QLSSVQ | | | | |
| N | | | | | T | | | | |
| PLNGAV | 435 | 0.652 | 1.127 | 7.62 | PVNGAV | 934 | 0.791 | 0.359 | 0.28 |
| HLYAQA | | | | | HLYAQA | | | | |
| QLTAVQ | | | | | QTGWFQ | | | | |
| N | | | | | N | | | | |
| PLNGAV | 436 | 0.892 | 1.125 | 3.22 | PLNGAV | 935 | 0.266 | 0.356 | 0.09 |
| HLYAQA | | | | | HLYAQA | | | | |
| QVQNVQ | | | | | QTASVR | | | | |
| N | | | | | N | | | | |
| PLNGAV | 437 | 0.737 | 1.117 | 14.63 | PLNGDV | 936 | 0.410 | 0.355 | 0.09 |
| HLYAQA | | | | | HLYAQA | | | | |
| QTKSVQ | | | | | QTSTVQ | | | | |
| N | | | | | N | | | | |
| PLNGAV | 438 | 0.847 | 1.117 | 16.64 | PLNGAV | 937 | 0.477 | 0.354 | 0.09 |
| HLYAQA | | | | | HLYAKA | | | | |
| QSVGVQ | | | | | QLGSVQ | | | | |
| N | | | | | N | | | | |
| QLNGAV | 439 | 0.413 | 1.116 | 0.09 | PINGAV | 938 | 0.774 | 0.354 | 0.09 |
| HLYAQA | | | | | HLYAQA | | | | |
| QLGPVQ | | | | | QLVPVQ | | | | |
| N | | | | | N | | | | |
| PLNGAV | 440 | 0.274 | 1.107 | 0.47 | PLNGAV | 939 | 0.833 | 0.354 | 0.09 |
| HLYAQA | | | | | HHYAQA | | | | |
| QTAWVQ | | | | | QLGPVQ | | | | |
| T | | | | | N | | | | |
| PLNGAV | 441 | 0.651 | 1.099 | 11.54 | PLNGAV | 940 | 0.387 | 0.353 | 0.19 |
| HLYAQA | | | | | HLYAPA | | | | |
| QNASVQ | | | | | QTGWVQ | | | | |
| N | | | | | H | | | | |
| PLNGAV | 442 | 0.661 | 1.098 | 45.57 | PLNGAV | 941 | 0.696 | 0.353 | 0.56 |
| HLYAQA | | | | | HLYAQA | | | | |
| QTSAVQ | | | | | QVPAVQ | | | | |
| N | | | | | N | | | | |
| ALNGAV | 443 | 0.530 | 1.097 | 0.09 | PLNGAV | 942 | 0.774 | 0.353 | 0.09 |
| HLYAQA | | | | | NLYAQA | | | | |
| QLAAVQ | | | | | QRLSVQ | | | | |
| N | | | | | N | | | | |
| PLNGAV | 444 | 0.721 | 1.097 | 0.09 | PLNGAV | 943 | 0.534 | 0.352 | 0.23 |
| HLYDQA | | | | | HLYAQA | | | | |
| QVSPVQ | | | | | QTGRVQ | | | | |
| N | | | | | K | | | | |
| PLNGAV | 445 | 0.442 | 1.095 | 0.09 | PLNGAV | 944 | 0.370 | 0.352 | 0.09 |
| HLYAQA | | | | | LLYAQA | | | | |
| QTMSVK | | | | | QTVSVQ | | | | |
| N | | | | | N | | | | |
| PLNGAV | 446 | 0.650 | 1.092 | 7.71 | PLNGAV | 945 | 0.510 | 0.351 | 11.4 |
| HLYAQA | | | | | HLYAQA | | | | |
| QTANVQ | | | | | QAMSVQ | | | | |
| N | | | | | N | | | | |
| PLNGAV | 447 | 0.358 | 1.092 | 5.19 | PLNGAV | 946 | 0.451 | 0.351 | 0.23 |
| HLYAQA | | | | | HLYAQA | | | | |
| QTGWFQ | | | | | QTAWVH | | | | |
| N | | | | | N | | | | |
| PLNGNV | 448 | 0.392 | 1.090 | 74.03 | PLNGAV | 947 | 0.615 | 0.350 | 0.09 |
| HLYAQA | | | | | HLYAQP | | | | |
| QTGWVQ | | | | | QTGWVR | | | | |
| N | | | | | N | | | | |
| PLNGSV | 449 | 0.195 | 1.087 | 0.23 | PLNGAV | 948 | 0.548 | 0.350 | 0.09 |
| HLYAQA | | | | | HLYAQE | | | | |
| QTGWVQ | | | | | QTGWLQ | | | | |
| S | | | | | N | | | | |
| PLNGAV | 450 | 0.279 | 1.081 | 0.09 | PLNGAV | 949 | 0.535 | 0.348 | 0.09 |
| HLYAQA | | | | | HLYAKA | | | | |
| QTGGVL | | | | | QTSAVQ | | | | |
| N | | | | | N | | | | |
| PLNGAV | 451 | 0.888 | 1.081 | 16.45 | PLNGSV | 950 | 0.126 | 0.348 | 0.98 |
| HLYAQA | | | | | HLYAQA | | | | |
| QLTSVQ | | | | | QTVWVQ | | | | |
| N | | | | | N | | | | |
| PLNGAV | 452 | 0.176 | 1.079 | 19.3 | PLNGTV | 951 | 0.330 | 0.347 | 0.33 |
| HLYAQA | | | | | HLYAQA | | | | |
| QTGWVQ | | | | | QTGWFQ | | | | |
| T | | | | | N | | | | |
| PLNGAV | 453 | 0.804 | 1.078 | 10.7 | PLNGAV | 952 | 0.375 | 0.347 | 0.23 |
| HLYAQA | | | | | NLYAQA | | | | |
| QRSQVQ | | | | | QVASVQ | | | | |
| N | | | | | N | | | | |
| PLNGAV | 454 | 0.840 | 1.074 | 0.09 | PLNGAV | 953 | 0.674 | 0.347 | 0.19 |
| HIYAQA | | | | | HLYAQA | | | | |
| QVSPVQ | | | | | QTGLVR | | | | |
| N | | | | | N | | | | |
| PLNGSV | 455 | 0.130 | 1.062 | 0.37 | PLNGAV | 954 | 0.587 | 0.346 | 0.09 |
| HLYAQA | | | | | NLYAQA | | | | |
| QTGWFQ | | | | | QLSTVQ | | | | |
| N | | | | | N | | | | |
| PLNGAV | 456 | 0.863 | 1.060 | 3.13 | PLNGAV | 955 | 0.721 | 0.346 | 0.09 |
| HLYAQA | | | | | HLYAKA | | | | |
| QRIPVQ | | | | | QTQPVQ | | | | |
| N | | | | | N | | | | |
| QLNGAV | 457 | 0.718 | 1.054 | 0.09 | PLNGTV | 956 | 0.382 | 0.346 | 0.33 |
| HLYAQA | | | | | HLYAQA | | | | |
| QLVPVQ | | | | | QTGWGQ | | | | |
| N | | | | | N | | | | |
| PLNGAV | 458 | 0.198 | 1.052 | 2.06 | PLNGAV | 957 | 0.453 | 0.345 | 0.09 |
| HLYAQA | | | | | HLYAQA | | | | |
| QTGWVQ | | | | | QRTLVQ | | | | |
| D | | | | | T | | | | |
| PLNGAV | 459 | 0.357 | 1.051 | 0.09 | PLNGAV | 958 | 0.157 | 0.345 | 0.61 |
| HLYAKA | | | | | HLYAQA | | | | |
| QVSSVQ | | | | | QTGSIQ | | | | |
| N | | | | | N | | | | |
| PLNGAV | 460 | 0.721 | 1.051 | 11.54 | QLNGAV | 959 | 0.574 | 0.344 | 1.4 |
| HLYAQA | | | | | HLYAQA | | | | |
| QRVEVQ | | | | | QTGWDQ | | | | |
| N | | | | | N | | | | |
| PLNGAV | 461 | 0.553 | 1.048 | 56.6 | PLNGAV | 960 | 0.599 | 0.344 | 0.14 |
| HLYAQA | | | | | HLYAQA | | | | |
| QVLPVQ | | | | | QLSSVK | | | | |
| N | | | | | N | | | | |
| PLNGSV | 462 | 0.194 | 1.044 | 0.28 | QLNGAV | 961 | 0.451 | 0.343 | 1.45 |
| HLYAQA | | | | | HLYAQA | | | | |
| QTGWVR | | | | | QTVSVQ | | | | |
| N | | | | | N | | | | |
| PLNGTV | 463 | 0.648 | 1.040 | 0.09 | PLNGAV | 962 | 0.726 | 0.343 | 0.09 |
| HLYAQA | | | | | HLYAQA | | | | |
| QSSPVQ | | | | | QTLQVQ | | | | |
| N | | | | | K | | | | |
| PLNGAV | 464 | 0.301 | 1.039 | 0.42 | TLNGAV | 963 | 0.573 | 0.343 | 0.14 |
| HLYAQA | | | | | HLYAQA | | | | |
| QTGGVQ | | | | | QVLPVQ | | | | |
| K | | | | | N | | | | |
| PLNGAV | 465 | 0.727 | 1.039 | 14.63 | PLNGAV | 964 | 0.756 | 0.342 | 0.09 |
| HLYAQA | | | | | HLYAQA | | | | |
| QSVAVQ | | | | | QVGSVK | | | | |
| N | | | | | N | | | | |
| QLNGAV | 466 | 0.815 | 1.030 | 0.09 | PLNGAV | 965 | 0.744 | 0.341 | 0.09 |
| HLYAQA | | | | | HLYAQA | | | | |
| QLSGVQ | | | | | QLAPLQ | | | | |
| N | | | | | N | | | | |
| PLNGAV | 467 | 0.384 | 1.026 | 11.26 | QLNGAV | 966 | 0.716 | 0.341 | 0.09 |
| HLYAQA | | | | | HLYAQA | | | | |
| QLQQVQ | | | | | QTGSVK | | | | |
| N | | | | | N | | | | |
| PLNGAV | 468 | 0.547 | 1.025 | 32.06 | PLNGAV | 967 | 0.620 | 0.341 | 0.09 |
| HLYAQA | | | | | HHYAQA | | | | |
| QLSTVQ | | | | | QRSTVQ | | | | |
| N | | | | | N | | | | |
| PLNGAV | 469 | 0.813 | 1.025 | 18.09 | QLNGSV | 968 | 0.266 | 0.341 | 0.23 |
| HLYAQA | | | | | HLYAQA | | | | |
| QSAAVQ | | | | | QTGRVQ | | | | |
| N | | | | | N | | | | |
| SLNGAV | 470 | 0.774 | 1.014 | 0.14 | TLNGAV | 969 | 0.818 | 0.340 | 0.09 |
| HLYAQA | | | | | HLYAQA | | | | |
| QVSAVQ | | | | | QVKPVQ | | | | |
| N | | | | | N | | | | |
| PLNGAV | 471 | 0.432 | 1.013 | 20.47 | PLNGTV | 970 | 0.784 | 0.339 | 24.58 |
| HLYAQA | | | | | HLYAQA | | | | |
| QRTSVQ | | | | | QTGLVQ | | | | |
| N | | | | | N | | | | |
| PLNGAV | 472 | 0.877 | 1.012 | 5.47 | PLNGAV | 971 | 0.396 | 0.338 | 0.65 |
| HLYAQA | | | | | HLYAQA | | | | |
| QTQNVQ | | | | | QTPGVQ | | | | |
| N | | | | | N | | | | |
| PLNGAV | 473 | 0.877 | 1.007 | 4.81 | PINGAV | 972 | 0.713 | 0.338 | 0.28 |
| HLYAQA | | | | | HLYAQA | | | | |
| QVNAVQ | | | | | QTSSVQ | | | | |
| N | | | | | N | | | | |
| PLNGAV | 474 | 0.585 | 1.006 | 0.09 | PLNGAV | 973 | 0.428 | 0.337 | 0.09 |
| HLYAQA | | | | | HLYAQA | | | | |
| QTVAVQ | | | | | QLSAVQ | | | | |
| T | | | | | T | | | | |
| PLNGAV | 475 | 0.487 | 1.005 | 20.75 | PLNGAV | 974 | 0.446 | 0.337 | 0.47 |
| HLYAQA | | | | | HLYSQA | | | | |
| QLMSVQ | | | | | QTGWDQ | | | | |
| N | | | | | N | | | | |
| PLNGAV | 476 | 0.179 | 1.000 | 15655 | PLNCAV | 975 | 0.856 | 0.336 | 14.39 |
| HLYAQA | | | | | HLYAQA | | | | |
| QTGWVQ | | | | | QTGWVQ | | | | |
| N | | | | | N | | | | |
| PLNGAV | 477 | 0.354 | 0.999 | 0.09 | PLNGAV | 976 | 0.624 | 0.336 | 0.14 |
| HLYAHA | | | | | NLYAQA | | | | |
| QTGWVQ | | | | | QTMPVQ | | | | |
| H | | | | | N | | | | |
| PLNGAV | 478 | 0.283 | 0.997 | 7.48 | PLNGAV | 977 | 0.283 | 0.335 | 0.09 |
| HLYAQA | | | | | HLYSQA | | | | |
| QTGWVQ | | | | | QTVAVQ | | | | |
| H | | | | | N | | | | |
| PLNGAV | 479 | 0.408 | 0.993 | 0.09 | PLNGTV | 978 | 0.366 | 0.334 | 0.79 |
| HHYAQA | | | | | HLYAQA | | | | |
| QTMSVQ | | | | | QTGWVK | | | | |
| N | | | | | N | | | | |
| PLNGAV | 480 | 0.228 | 0.978 | 3.08 | PLNGGV | 979 | 0.465 | 0.333 | 0.37 |
| HLYAQA | | | | | HLYAQA | | | | |
| QTGWVQ | | | | | QTGWVH | | | | |
| S | | | | | N | | | | |
| PLNGAV | 481 | 0.409 | 0.976 | 0.09 | QLNGAV | 980 | 0.558 | 0.332 | 1.59 |
| HLYDQA | | | | | HLYAQA | | | | |
| QTTPVQ | | | | | QTGWVQ | | | | |
| N | | | | | K | | | | |
| PLNGAV | 482 | 0.837 | 0.973 | 3.69 | PLNGAV | 981 | 0.524 | 0.331 | 0.09 |
| HLYAQA | | | | | QLYAQA | | | | |
| QTMMVQ | | | | | QTLAVQ | | | | |
| N | | | | | N | | | | |
| PLNGAV | 483 | 0.293 | 0.971 | 0.14 | PLNGTV | 982 | 0.695 | 0.331 | 0.09 |
| HLYAQA | | | | | HLYAQA | | | | |
| QTGGVQ | | | | | QVGSVQ | | | | |
| S | | | | | N | | | | |
| PLNGAV | 484 | 0.499 | 0.969 | 0.14 | PLNGGV | 983 | 0.764 | 0.330 | 17.67 |
| NLYAQA | | | | | HLYAQA | | | | |
| QTSPVQ | | | | | QTGGVQ | | | | |
| N | | | | | N | | | | |
| ALNGAV | 485 | 0.322 | 0.968 | 47.95 | PLKGAV | 984 | 0.474 | 0.330 | 0.09 |
| HLYAQA | | | | | HLYAQA | | | | |
| QTGLVQ | | | | | QVSQVQ | | | | |
| N | | | | | N | | | | |
| ALNGAV | 486 | 0.247 | 0.964 | 0.09 | PLNGAV | 985 | 0.526 | 0.330 | 0.09 |
| HLYAQA | | | | | HHYAQA | | | | |
| QVATVQ | | | | | QTQPVQ | | | | |
| N | | | | | N | | | | |
| PLNGAV | 487 | 0.258 | 0.959 | 0.23 | PLNGAV | 986 | 0.156 | 0.329 | 0.33 |
| HLYAQA | | | | | HLYAQA | | | | |
| QTGSFQ | | | | | PTGWVQ | | | | |
| N | | | | | T | | | | |
| PLNGAV | 488 | 0.422 | 0.958 | 27.01 | PLNGAV | 987 | 0.343 | 0.329 | 0.33 |
| HLYAQA | | | | | NLYAQA | | | | |
| QRSVVQ | | | | | QTMSVQ | | | | |
| N | | | | | N | | | | |
| PLNGAV | 489 | 0.224 | 0.957 | 0.65 | PLNGAV | 988 | 0.681 | 0.329 | 29.16 |
| HLYAQA | | | | | HLYAQA | | | | |
| QTGSVQ | | | | | QTGVVQ | | | | |
| K | | | | | N | | | | |
| PLNGAV | 490 | 0.503 | 0.954 | 16.31 | PLNGAV | 989 | 0.622 | 0.328 | 0.42 |
| HLYAQA | | | | | HLYAQA | | | | |
| QTQLVQ | | | | | QVPQVQ | | | | |
| N | | | | | N | | | | |
| PLNGAV | 491 | 0.252 | 0.954 | 0.19 | PHNGAV | 990 | 0.295 | 0.327 | 0.14 |
| HLYAQA | | | | | HLYAQA | | | | |
| QTGGVH | | | | | QTMSVQ | | | | |
| N | | | | | N | | | | |
| PLNGAV | 492 | 0.328 | 0.953 | 11.92 | QLNGAV | 991 | 0.493 | 0.327 | 0.56 |
| HLYAQA | | | | | HLYAQA | | | | |
| QRTPVQ | | | | | QTGWLQ | | | | |
| N | | | | | N | | | | |
| PLNGAV | 493 | 0.852 | 0.952 | 5.33 | PLNGAV | 992 | 0.118 | 0.327 | 1.03 |
| HLYAQA | | | | | HLYAQA | | | | |
| QRQQVQ | | | | | QTGCVQ | | | | |
| N | | | | | K | | | | |
| PLNGAV | 494 | 0.321 | 0.952 | 0.19 | SLNGAV | 993 | 0.712 | 0.327 | 0.28 |
| HLYAQA | | | | | HLYAQA | | | | |
| QTGSVR | | | | | QTSLVQ | | | | |
| N | | | | | N | | | | |
| PLNGAV | 495 | 0.758 | 0.946 | 11.87 | PLNGAV | 994 | 0.422 | 0.326 | 0.23 |
| HLYAQA | | | | | HLYAQA | | | | |
| QVQGVQ | | | | | QTRWVQ | | | | |
| N | | | | | T | | | | |
| TLNGAV | 496 | 0.854 | 0.942 | 0.14 | ILNGAV | 995 | 0.743 | 0.325 | 0.09 |
| HLYAQA | | | | | HLYAQA | | | | |
| QVSPVQ | | | | | QTVQVQ | | | | |
| N | | | | | N | | | | |
| PLNGAV | 497 | 0.205 | 0.942 | 0.23 | ALNGAV | 996 | 0.762 | 0.324 | 0.09 |
| HLYAQA | | | | | HLYAQA | | | | |
| QPGWVQ | | | | | QKGGVQ | | | | |
| T | | | | | N | | | | |
| PLNGAV | 498 | 0.407 | 0.941 | 17.25 | PLNGAV | 997 | 0.143 | 0.323 | 0.09 |
| HLYAQA | | | | | HLYDQA | | | | |
| QSTQVQ | | | | | QVSGVQ | | | | |
| N | | | | | N | | | | |
| PLNGSV | 499 | 0.247 | 0.939 | 0.09 | PLNGAV | 998 | 0.554 | 0.323 | 0.65 |
| HLYAQA | | | | | HLYAQA | | | | |
| QTGWVE | | | | | QTGLDQ | | | | |
| N | | | | | N | | | | |
| PLNGAV | 500 | 0.267 | 0.934 | 22.29 | PLNGAV | 999 | 0.387 | 0.323 | 0.42 |
| HLYAQA | | | | | PLYAQA | | | | |
| QQSPVQ | | | | | QTGWVQ | | | | |
| N | | | | | T | | | | |
| PLNGAV | 501 | 0.517 | 0.934 | 8.23 | PLNGAV | 1000 | 0.414 | 0.323 | 0.09 |
| HLYAQA | | | | | HLYAQA | | | | |
| QRYSVQ | | | | | QVSSVH | | | | |
| N | | | | | N | | | | |
| PLNGAV | 502 | 0.267 | 0.930 | 9.77 | TLNGAV | 1001 | 0.264 | 0.322 | 0.09 |
| HLYAQA | | | | | HLYAQA | | | | |
| QTGWDQ | | | | | QTNSVQ | | | | |
| N | | | | | N | | | | |
| PLNGAV | 503 | 0.774 | 0.930 | 4.67 | PLNGAG | 1002 | 0.479 | 0.321 | 0.09 |
| HLYAQA | | | | | HLYAQA | | | | |
| QTQRVQ | | | | | QLSPVQ | | | | |
| N | | | | | N | | | | |
| ALNGAV | 504 | 0.330 | 0.926 | 0.23 | HLNGAV | 1003 | 0.532 | 0.321 | 0.19 |
| HLYAQA | | | | | HLYAQA | | | | |
| QTGWVR | | | | | QTGRVQ | | | | |
| N | | | | | N | | | | |
| PLNGAV | 505 | 0.370 | 0.923 | 171 | PLNGAV | 1004 | 0.872 | 0.320 | 0.09 |
| HLYAQP | | | | | HLYDQA | | | | |
| QTGWVQ | | | | | QTAMVQ | | | | |
| N | | | | | N | | | | |
| ALNGAV | 506 | 0.516 | 0.920 | 0.09 | PINGAV | 1005 | 0.646 | 0.320 | 0.33 |
| HLYAQA | | | | | HLYAQA | | | | |
| QVSGVQ | | | | | QTGWVQ | | | | |
| N | | | | | H | | | | |
| PLNGAV | 507 | 0.813 | 0.920 | 17.01 | PLNGAV | 1006 | 0.479 | 0.319 | 0.09 |
| HLYAQA | | | | | QLYAQA | | | | |
| QSAGVQ | | | | | QTLQVQ | | | | |
| N | | | | | N | | | | |
| PLNGAV | 508 | 0.734 | 0.918 | 0.09 | PLNGAV | 1007 | 0.323 | 0.318 | 0.28 |
| HLYAQA | | | | | HLYAQA | | | | |
| QSAPVQ | | | | | QKGWVQ | | | | |
| T | | | | | T | | | | |
| PLNGAV | 509 | 0.499 | 0.914 | 13.97 | PLNGAV | 1008 | 0.592 | 0.318 | 0.09 |
| HLYAQA | | | | | HHYAQA | | | | |
| QRQSVQ | | | | | QSTSVQ | | | | |
| N | | | | | N | | | | |
| PLNGAV | 510 | 0.591 | 0.906 | 20.42 | PLNGYV | 1009 | 0.187 | 0.317 | 2.99 |
| HLYAQA | | | | | HLYAQA | | | | |
| QSQPVQ | | | | | QTGWVQ | | | | |
| N | | | | | N | | | | |
| PLNGAV | 511 | 0.570 | 0.906 | 0.09 | PLNGAV | 1010 | 0.599 | 0.316 | 0.09 |
| HLYAQA | | | | | HIYAQA | | | | |
| QVASVK | | | | | QVQSVQ | | | | |
| N | | | | | N | | | | |
| PLNGAV | 512 | 0.403 | 0.904 | 0.09 | PLIGAV | 1011 | 0.535 | 0.315 | 0.09 |
| HLYAQA | | | | | HLYAQA | | | | |
| QTAWVR | | | | | QLSPVQ | | | | |
| N | | | | | N | | | | |
| SLNGAV | 513 | 0.491 | 0.904 | 0.09 | TLNGAV | 1012 | 0.774 | 0.315 | 0.09 |
| HLYAQA | | | | | HLYAQA | | | | |
| QTMQVQ | | | | | QLLPVQ | | | | |
| N | | | | | N | | | | |
| PLNGAV | 514 | 0.664 | 0.902 | 0.09 | PLNGAV | 1013 | 0.747 | 0.315 | 0.84 |
| NLYAQA | | | | | HLYSQA | | | | |
| QSSPVQ | | | | | QTGWVQ | | | | |
| N | | | | | T | | | | |
| PLNGAV | 515 | 0.318 | 0.901 | 0.23 | ALNGAV | 1014 | 0.444 | 0.315 | 0.14 |
| HLYAQA | | | | | HLYAQA | | | | |
| QTGGGQ | | | | | QTQLVQ | | | | |
| N | | | | | N | | | | |
| PLNGAV | 516 | 0.515 | 0.898 | 0.09 | PLNGAV | 1015 | 0.810 | 0.315 | 34.86 |
| HLYDQA | | | | | HLYAQA | | | | |
| QVASVQ | | | | | QSLPVQ | | | | |
| N | | | | | N | | | | |
| PLNGAV | 517 | 0.709 | 0.897 | 45.94 | PVNGAV | 1016 | 0.890 | 0.314 | 0.09 |
| HLYAQA | | | | | HLYAQA | | | | |
| QSTSVQ | | | | | QTGWVP | | | | |
| N | | | | | N | | | | |
| PLNGTV | 518 | 0.403 | 0.894 | 0.23 | PLNGAV | 1017 | 0.247 | 0.313 | 0.19 |
| HLYAQA | | | | | HLYAQA | | | | |
| QTGWVQ | | | | | KTVSVQ | | | | |
| H | | | | | N | | | | |
| QLNGAV | 519 | 0.718 | 0.892 | 0.42 | PLNGAV | 1018 | 0.645 | 0.313 | 0.09 |
| HLYAQA | | | | | HLYAQA | | | | |
| QTSSVQ | | | | | QTTSVH | | | | |
| N | | | | | N | | | | |
| PLDGAV | 520 | 0.613 | 0.892 | 0.09 | PVNGAV | 1019 | 0.765 | 0.313 | 939 |
| HLYAQA | | | | | HLYAQA | | | | |
| QTGWVH | | | | | QTGWVQ | | | | |
| N | | | | | N | | | | |
| PLNGTV | 521 | 0.397 | 0.888 | 0.33 | PLNGAV | 1020 | 0.476 | 0.313 | 0.09 |
| HLYAQA | | | | | HLYAQA | | | | |
| QTGWVQ | | | | | HTGWVQ | | | | |
| K | | | | | I | | | | |
| PLNGAV | 522 | 0.369 | 0.888 | 20.28 | PLNGAV | 1021 | 0.611 | 0.313 | 0.09 |
| HLYAQA | | | | | RLYAQA | | | | |
| QVLGVQ | | | | | QTASVQ | | | | |
| N | | | | | N | | | | |
| PLNGAV | 523 | 0.640 | 0.887 | 5.7 | PLNGGV | 1022 | 0.646 | 0.313 | 0.09 |
| HLYAQA | | | | | HLYAQA | | | | |
| QNQPVQ | | | | | QTGLVQ | | | | |
| N | | | | | K | | | | |
| PLNGAV | 524 | 0.605 | 0.885 | 21.08 | PLNGAV | 1023 | 0.652 | 0.313 | 0.14 |
| HLYAQA | | | | | NLYAQA | | | | |
| QLGTVQ | | | | | QVMSVQ | | | | |
| N | | | | | N | | | | |
| PLNGAV | 525 | 0.637 | 0.882 | 7.57 | PLNGAV | 1024 | 0.682 | 0.312 | 0.09 |
| HLYAQA | | | | | NLYAQA | | | | |
| QRAGVQ | | | | | QSMSVQ | | | | |
| N | | | | | N | | | | |
| PVNGAV | 526 | 0.837 | 0.882 | 42.25 | PLNGAV | 1025 | 0.513 | 0.312 | 0.09 |
| HLYAQA | | | | | HLYAPA | | | | |
| QTGLVQ | | | | | QTGWGQ | | | | |
| N | | | | | N | | | | |
| PLNGGV | 527 | 0.529 | 0.881 | 0.33 | QLNGAV | 1026 | 0.595 | 0.311 | 0.47 |
| HLYAQA | | | | | HLYAQA | | | | |
| QTGWVQ | | | | | QTGWAQ | | | | |
| H | | | | | N | | | | |
| PLNGAV | 528 | 0.677 | 0.879 | 116.4 | PLNGAV | 1027 | 0.451 | 0.311 | 23.13 |
| HLYAQA | | | | | HLYAQA | | | | |
| QTGRVQ | | | | | QTVWVQ | | | | |
| N | | | | | N | | | | |
| PLNGAV | 529 | 0.266 | 0.876 | 0.56 | QLNGAV | 1028 | 0.742 | 0.311 | 0.09 |
| HLYAQA | | | | | HLYAQA | | | | |
| QTGGVK | | | | | QSVSVQ | | | | |
| N | | | | | N | | | | |
| PLNGAV | 530 | 0.251 | 0.874 | 0.14 | PLNGAV | 1029 | 0.426 | 0.311 | 0.09 |
| HLYAQA | | | | | HLYAQA | | | | |
| QTAWLQ | | | | | QTAQLQ | | | | |
| N | | | | | N | | | | |
| PLNGAV | 531 | 0.269 | 0.870 | 0.14 | PLNGAV | 1030 | 0.453 | 0.311 | 0.09 |
| HLYAQA | | | | | HLYAQA | | | | |
| QTRWVQ | | | | | HVASVQ | | | | |
| K | | | | | N | | | | |
| PLNGAV | 532 | 0.699 | 0.858 | 0.09 | PLNGAV | 1031 | 0.440 | 0.310 | 0.09 |
| HLYAQA | | | | | HLYAKA | | | | |
| QLAPVK | | | | | QRSTVQ | | | | |
| N | | | | | N | | | | |
| PLNGAV | 533 | 0.390 | 0.855 | 0.09 | QLNGAV | 1032 | 0.509 | 0.310 | 1.92 |
| HHYAQA | | | | | HLYAQA | | | | |
| QTSSVQ | | | | | QTGWVK | | | | |
| N | | | | | N | | | | |
| PLNGAV | 534 | 0.402 | 0.851 | 0.14 | PLNGAV | 1033 | 0.281 | 0.310 | 0.28 |
| HLYAQA | | | | | HLYAQA | | | | |
| QTGSVQ | | | | | QTRWVK | | | | |
| D | | | | | N | | | | |
| PLNGAV | 535 | 0.557 | 0.849 | 27.67 | PLNGAV | 1034 | 0.381 | 0.310 | 0.19 |
| HLYAQA | | | | | HLYAQA | | | | |
| QTGMVQ | | | | | QTAWIQ | | | | |
| N | | | | | N | | | | |
| PLNGAV | 536 | 0.647 | 0.848 | 15.14 | PLNGAV | 1035 | 0.393 | 0.310 | 0.09 |
| HLYAQA | | | | | HLYAQA | | | | |
| QLSNVQ | | | | | QLSQVK | | | | |
| N | | | | | N | | | | |
| PLNGAV | 537 | 0.502 | 0.844 | 14.39 | SLNGAV | 1036 | 0.816 | 0.310 | 2284 |
| HLYAQA | | | | | HLYAQA | | | | |
| QRLPVQ | | | | | QTGWVQ | | | | |
| N | | | | | N | | | | |
| PLNGAV | 538 | 0.782 | 0.842 | 7.52 | PLNGAV | 1037 | 0.390 | 0.309 | 0.14 |
| HLYAQA | | | | | HLYAQA | | | | |
| QRQGVQ | | | | | QTSTVK | | | | |
| N | | | | | N | | | | |
| PLNGAV | 539 | 0.563 | 0.839 | 0.09 | PLNGAV | 1038 | 0.654 | 0.309 | 16.82 |
| HLYAQA | | | | | HLYAQA | | | | |
| QSTPVQ | | | | | QALPVQ | | | | |
| T | | | | | N | | | | |
| QLNGNV | 540 | 0.844 | 0.838 | 5.56 | PLNGAV | 1039 | 0.158 | 0.309 | 0.33 |
| HLYAQA | | | | | HLYDQA | | | | |
| QTGWVQ | | | | | QTGWFQ | | | | |
| N | | | | | N | | | | |
| PLNGGV | 541 | 0.559 | 0.835 | 0.84 | PLNGAV | 1040 | 0.527 | 0.309 | 0.09 |
| HLYAQA | | | | | HVYAQA | | | | |
| QTGWVQ | | | | | QTGWFQ | | | | |
| T | | | | | N | | | | |
| PLNGAV | 542 | 0.470 | 0.833 | 0.09 | PINGAV | 1041 | 0.386 | 0.308 | 0.09 |
| HLYAQA | | | | | HLYAQA | | | | |
| QTTPVK | | | | | QVGSVQ | | | | |
| N | | | | | N | | | | |
| PLNGAV | 543 | 0.700 | 0.832 | 18.65 | PLNGSV | 1042 | 0.418 | 0.308 | 0.14 |
| HLYAQA | | | | | HLYAQA | | | | |
| QRLTVQ | | | | | QTTGVQ | | | | |
| N | | | | | N | | | | |
| PLNGAV | 544 | 0.373 | 0.830 | 7.52 | PLNGAV | 1043 | 0.874 | 0.307 | 0.09 |
| HLYAQA | | | | | HLYAKA | | | | |
| QTLRVQ | | | | | QASPVQ | | | | |
| N | | | | | N | | | | |
| PLNGAV | 545 | 0.742 | 0.830 | 7.34 | PLNGSV | 1044 | 0.192 | 0.307 | 0.09 |
| HLYAQA | | | | | HLYAQA | | | | |
| QSAFVQ | | | | | QKAWVQ | | | | |
| N | | | | | N | | | | |
| SLNGAV | 546 | 0.586 | 0.824 | 0.09 | SLNGAV | 1045 | 0.270 | 0.307 | 0.09 |
| HLYAQA | | | | | HLYAQA | | | | |
| QTNSVQ | | | | | QVLGVQ | | | | |
| N | | | | | N | | | | |
| PLNGAV | 547 | 0.658 | 0.824 | 6.92 | PLNGAV | 1046 | 0.827 | 0.306 | 0.09 |
| HLYAQA | | | | | HLYAQE | | | | |
| QSVQVQ | | | | | QLMPVQ | | | | |
| N | | | | | N | | | | |
| PLDGAV | 548 | 0.568 | 0.823 | 0.09 | ALNGAV | 1047 | 0.872 | 0.306 | 18.51 |
| HLYAQA | | | | | HLYAQS | | | | |
| QTAAVQ | | | | | QTGWVQ | | | | |
| N | | | | | N | | | | |
| SLNGAV | 549 | 0.532 | 0.821 | 0.09 | PLNGYV | 1048 | 0.508 | 0.305 | 0.09 |
| HLYAQA | | | | | HLYDQA | | | | |
| QLMPVQ | | | | | QTGWVQ | | | | |
| N | | | | | N | | | | |
| PLDGAV | 550 | 0.621 | 0.820 | 0.47 | PLNGAV | 1049 | 0.505 | 0.305 | 0.09 |
| HLYAQA | | | | | HLYAQA | | | | |
| QTGWVQ | | | | | QTSMVQ | | | | |
| T | | | | | T | | | | |
| PLNGAV | 551 | 0.672 | 0.819 | 49.77 | QLNGAV | 1050 | 0.588 | 0.304 | 0.14 |
| HLYAQA | | | | | HLYAQA | | | | |
| QLLPVQ | | | | | QISSVQ | | | | |
| N | | | | | N | | | | |
| PLNGAV | 552 | 0.738 | 0.815 | 6.64 | PVNGAV | 1051 | 0.723 | 0.304 | 1.12 |
| HLYAQA | | | | | HLYAQA | | | | |
| QRTQVQ | | | | | QTGWVQ | | | | |
| N | | | | | T | | | | |
| PLNGAV | 553 | 0.254 | 0.813 | 0.79 | PLNGAV | 1052 | 0.713 | 0.303 | 0.09 |
| HLYAQA | | | | | HLYAQE | | | | |
| QTGSDQ | | | | | QTATVQ | | | | |
| N | | | | | N | | | | |
| PLNGAV | 554 | 0.430 | 0.808 | 0.09 | PLNGAV | 1053 | 0.352 | 0.302 | 0.09 |
| HLYAQA | | | | | YLYAQA | | | | |
| QVASDQ | | | | | QTVSVQ | | | | |
| N | | | | | N | | | | |
| PLNGAV | 555 | 0.744 | 0.805 | 0.09 | PLNGNV | 1054 | 0.521 | 0.302 | 0.09 |
| NLYAQA | | | | | HLYAQA | | | | |
| QLAPVQ | | | | | QTASVQ | | | | |
| N | | | | | N | | | | |
| PLNGSV | 556 | 0.160 | 0.804 | 0.37 | PLNGYV | 1055 | 0.556 | 0.301 | 0.09 |
| HLYAQA | | | | | HLYAQA | | | | |
| QTGWLQ | | | | | QTGLVQ | | | | |
| N | | | | | N | | | | |
| PLNGTV | 557 | 0.253 | 0.801 | 500.6 | PLNGAV | 1056 | 0.402 | 0.301 | 0.14 |
| HLYAQA | | | | | HLYDQA | | | | |
| QTGWVQ | | | | | QTLSVQ | | | | |
| N | | | | | N | | | | |
| PLNGAV | 558 | 0.857 | 0.801 | 0.14 | PLNGAV | 1057 | 0.499 | 0.300 | 0.14 |
| HLYAQA | | | | | HLYAQA | | | | |
| QVSPVK | | | | | QTSSVQ | | | | |
| N | | | | | H | | | | |
| PLNGAV | 559 | 0.480 | 0.801 | 1.22 | SLNGAV | 1058 | 0.737 | 0.300 | 0.19 |
| HLYAQA | | | | | HLYAQA | | | | |
| QLPPVQ | | | | | QTGWVP | | | | |
| N | | | | | N | | | | |
| PLNGAV | 560 | 0.521 | 0.794 | 0.14 | PLNGAV | 1059 | 0.839 | 0.300 | 0.09 |
| HLYAQA | | | | | HLYAQA | | | | |
| QSSPVQ | | | | | QTAMVK | | | | |
| T | | | | | N | | | | |
| PLNGAV | 561 | 0.585 | 0.790 | 8.88 | TLNGAV | 1060 | 0.700 | 0.299 | 0.14 |
| HLYAQA | | | | | HLYAQA | | | | |
| QAQPVQ | | | | | QRLSVQ | | | | |
| N | | | | | N | | | | |
| PLNGDV | 562 | 0.434 | 0.789 | 0.09 | ALNGAV | 1061 | 0.341 | 0.297 | 1.64 |
| HLYAQA | | | | | HLYAQA | | | | |
| QTTSVQ | | | | | QTGWVQ | | | | |
| N | | | | | K | | | | |
| PLNGAV | 563 | 0.392 | 0.788 | 0.75 | PLNGAV | 1062 | 0.722 | 0.297 | 0.19 |
| HLYAQA | | | | | HLYAKA | | | | |
| QTPQVQ | | | | | QTALVQ | | | | |
| N | | | | | N | | | | |
| PLNGAV | 564 | 0.571 | 0.787 | 29.35 | QLNGAV | 1063 | 0.743 | 0.297 | 0.23 |
| HLYAQA | | | | | HLYAQA | | | | |
| QTSWVQ | | | | | QTAKVQ | | | | |
| N | | | | | N | | | | |
| PLNGAV | 565 | 0.254 | 0.784 | 0.51 | PLNGAD | 1064 | 0.744 | 0.297 | 0.14 |
| HLYAQA | | | | | HLYAQA | | | | |
| QTGGDQ | | | | | QTTSVQ | | | | |
| N | | | | | N | | | | |
| PLNGAV | 566 | 0.547 | 0.782 | 0.14 | PLNGAV | 1065 | 0.259 | 0.297 | 0.93 |
| HLYAQA | | | | | HLYAQA | | | | |
| QLSPVK | | | | | QTPWVQ | | | | |
| N | | | | | N | | | | |
| PLNGAV | 567 | 0.603 | 0.782 | 0.09 | PLNGTV | 1066 | 0.324 | 0.296 | 0.28 |
| HLYAQA | | | | | HLYAQA | | | | |
| QSSPVK | | | | | QTGWIQ | | | | |
| N | | | | | N | | | | |
| PLNGAV | 568 | 0.727 | 0.781 | 8.41 | PLNGAV | 1067 | 0.286 | 0.296 | 0.23 |
| HLYAQA | | | | | HLYAQA | | | | |
| QNTTVQ | | | | | HTGWVQ | | | | |
| N | | | | | H | | | | |
| PLDGAV | 569 | 0.716 | 0.780 | 0.19 | PLNGAV | 1068 | 0.622 | 0.296 | 0.09 |
| HLYAQA | | | | | HLYARA | | | | |
| QTGWVQ | | | | | QTASVQ | | | | |
| H | | | | | N | | | | |
| PLNGAV | 570 | 0.823 | 0.773 | 6.31 | TLNGAV | 1069 | 0.876 | 0.295 | 0.14 |
| HLYAQA | | | | | HLYAQA | | | | |
| QTTRVQ | | | | | QRSLVQ | | | | |
| N | | | | | N | | | | |
| PLDGAV | 571 | 0.722 | 0.767 | 0.09 | PLNGAV | 1070 | 0.481 | 0.294 | 0.14 |
| HLYAQA | | | | | HLYAQA | | | | |
| QTGWLQ | | | | | HTGWVQ | | | | |
| N | | | | | K | | | | |
| PLNGSV | 572 | 0.681 | 0.757 | 8.32 | PLNGDV | 1071 | 0.859 | 0.294 | 0.14 |
| HLYAQP | | | | | HLYAQA | | | | |
| QTGWVQ | | | | | QTAQVQ | | | | |
| N | | | | | N | | | | |
| PLNGAV | 573 | 0.794 | 0.755 | 25.1 | TLNGAV | 1072 | 0.407 | 0.294 | 0.14 |
| HLYSQA | | | | | HLYAQA | | | | |
| QTGLVQ | | | | | QTQPVQ | | | | |
| N | | | | | N | | | | |
| PLNGAV | 574 | 0.654 | 0.755 | 14.16 | PLNGAV | 1073 | 0.505 | 0.294 | 0.7 |
| HLYAQA | | | | | HLYAQA | | | | |
| QTQWVQ | | | | | QTPRVQ | | | | |
| N | | | | | N | | | | |
| PLNGSV | 575 | 0.187 | 0.754 | 0.33 | PRNGAV | 1074 | 0.200 | 0.293 | 0.09 |
| HLYAQA | | | | | HLYAQA | | | | |
| QTGWVQ | | | | | QTMSVQ | | | | |
| I | | | | | N | | | | |
| PLNGAV | 576 | 0.259 | 0.753 | 0.28 | PLNGAV | 1075 | 0.118 | 0.293 | 0.23 |
| HLYAQA | | | | | HLYAQA | | | | |
| QTGSVH | | | | | HTVSVQ | | | | |
| N | | | | | N | | | | |
| ALNGAV | 577 | 0.367 | 0.751 | 1129 | PVNGAV | 1076 | 0.823 | 0.293 | 0.14 |
| HLYAQA | | | | | HLYAQA | | | | |
| QTGWVQ | | | | | QTGLVQ | | | | |
| N | | | | | T | | | | |
| PLNGTV | 578 | 0.224 | 0.749 | 0.14 | PLNGAV | 1077 | 0.899 | 0.292 | 87.25 |
| HLYAQA | | | | | HLYAQA | | | | |
| QTGWVR | | | | | QSSSVQ | | | | |
| N | | | | | N | | | | |
| PLNGAV | 579 | 0.240 | 0.749 | 0.23 | PLNGAV | 1078 | 0.497 | 0.292 | 0.84 |
| HLYAQA | | | | | HLYAQA | | | | |
| QTGGLQ | | | | | QRPPVQ | | | | |
| N | | | | | N | | | | |
| SLNGAV | 580 | 0.712 | 0.748 | 0.09 | PLNGAV | 1079 | 0.779 | 0.291 | 0.09 |
| HLYAQA | | | | | HLYTQA | | | | |
| QVSGVQ | | | | | QVSPVQ | | | | |
| N | | | | | N | | | | |
| PLNGAV | 581 | 0.404 | 0.747 | 0.37 | PLNGAV | 1080 | 0.661 | 0.291 | 0.09 |
| HLYAQA | | | | | PLYAQA | | | | |
| QTAWVQ | | | | | QTTPVQ | | | | |
| K | | | | | N | | | | |
| PLNGAV | 582 | 0.660 | 0.747 | 0.19 | ALNGAV | 1081 | 0.293 | 0.290 | 1.59 |
| HLYAQA | | | | | HLYAQA | | | | |
| QTGRVQ | | | | | QTGWVK | | | | |
| T | | | | | N | | | | |
| TLNGAV | 583 | 0.754 | 0.739 | 0.09 | SLNGAV | 1082 | 0.871 | 0.290 | 0.56 |
| HLYAQA | | | | | HLYAQA | | | | |
| QSAPVQ | | | | | QTGWVR | | | | |
| N | | | | | N | | | | |
| PLNGAV | 584 | 0.449 | 0.738 | 0.09 | PLNGAV | 1083 | 0.316 | 0.288 | 0.09 |
| HLYDQA | | | | | HLYAQA | | | | |
| QTVAVQ | | | | | QLAGVK | | | | |
| N | | | | | N | | | | |
| QLNGAV | 585 | 0.892 | 0.735 | 48.7 | PLNGAV | 1084 | 0.427 | 0.288 | 0.09 |
| HLYAQA | | | | | HLYAQA | | | | |
| QTGSVQ | | | | | QTSPAQ | | | | |
| N | | | | | N | | | | |
| PLNGAV | 586 | 0.858 | 0.733 | 5.37 | PLNGAV | 1085 | 0.539 | 0.288 | 0.19 |
| HLYAQA | | | | | HLYAKA | | | | |
| QNTQVQ | | | | | QLSSVQ | | | | |
| N | | | | | N | | | | |
| PLNGAV | 587 | 0.512 | 0.729 | 5.05 | PLNGAV | 1086 | 0.526 | 0.285 | 0.14 |
| HLYAQA | | | | | HLYAQA | | | | |
| QTGWLQ | | | | | QRSPVQ | | | | |
| N | | | | | T | | | | |
| PINGAV | 588 | 0.684 | 0.721 | 45.57 | PLNGAV | 1087 | 0.826 | 0.285 | 0.14 |
| HLYAQA | | | | | HLYAHA | | | | |
| QTGLVQ | | | | | QTMSVQ | | | | |
| N | | | | | N | | | | |
| PLDGAV | 589 | 0.600 | 0.719 | 0.09 | PLNGNV | 1088 | 0.429 | 0.284 | 0.14 |
| HLYAQA | | | | | HLYAQA | | | | |
| QTGWVQ | | | | | QTGWVK | | | | |
| I | | | | | N | | | | |
| PLNGSV | 590 | 0.369 | 0.713 | 0.09 | PLNGAV | 1089 | 0.409 | 0.284 | 0.09 |
| HLYAQA | | | | | HLYAQA | | | | |
| QTGSVQ | | | | | QTGWVP | | | | |
| T | | | | | H | | | | |
| PLNGAV | 591 | 0.460 | 0.711 | 0.09 | PLNGAV | 1090 | 0.442 | 0.284 | 0.09 |
| QLYAQA | | | | | HLYAQA | | | | |
| QTSSVQ | | | | | QPGWGQ | | | | |
| N | | | | | N | | | | |
| PLNGAV | 592 | 0.658 | 0.707 | 5.61 | PLNGVV | 1091 | 0.291 | 0.284 | 0.14 |
| HLYAQA | | | | | HLYAQA | | | | |
| QTYAVQ | | | | | QTVSVQ | | | | |
| N | | | | | N | | | | |
| PLNGAV | 593 | 0.575 | 0.703 | 81.37 | PLNGDV | 1092 | 0.499 | 0.283 | 0.19 |
| HLYAQA | | | | | HLYAQA | | | | |
| QTLSVQ | | | | | QTSSVQ | | | | |
| N | | | | | N | | | | |
| PLNGAV | 594 | 0.874 | 0.703 | 12.15 | PLNGAV | 1093 | 0.570 | 0.283 | 0.14 |
| HLYAQA | | | | | HIYAQA | | | | |
| QNLPVQ | | | | | QTLSVQ | | | | |
| N | | | | | N | | | | |
| PLNGAV | 595 | 0.328 | 0.702 | 0.09 | PLNGAV | 1094 | 0.597 | 0.283 | 0.19 |
| HLYAQA | | | | | HLYAQA | | | | |
| QTSSDQ | | | | | QIPPVQ | | | | |
| N | | | | | N | | | | |
| PLNGAV | 596 | 0.736 | 0.702 | 23.93 | SLNGAV | 1095 | 0.856 | 0.282 | 1.03 |
| HLYAQA | | | | | HLYAQA | | | | |
| QATSVQ | | | | | QTGWVQ | | | | |
| N | | | | | H | | | | |
| TLNGAV | 597 | 0.353 | 0.701 | 0.23 | PLNAAV | 1096 | 0.466 | 0.282 | 0.14 |
| HLYAQA | | | | | HLYAQA | | | | |
| QLSPVQ | | | | | QTGWDQ | | | | |
| N | | | | | N | | | | |
| PLNGAV | 598 | 0.271 | 0.700 | 0.14 | PLNGAV | 1097 | 0.823 | 0.282 | 0.09 |
| HLYAQA | | | | | HRYAQA | | | | |
| QTAWFQ | | | | | QTTSVQ | | | | |
| N | | | | | N | | | | |
| TLNGAV | 599 | 0.801 | 0.700 | 0.09 | PLNGSV | 1098 | 0.394 | 0.281 | 0.09 |
| HLYAQA | | | | | HLYAQA | | | | |
| QVTPVQ | | | | | QPGSVQ | | | | |
| N | | | | | N | | | | |
| TLNGAV | 600 | 0.202 | 0.696 | 0.09 | PLDGAV | 1099 | 0.838 | 0.281 | 0.09 |
| HLYAQA | | | | | HLYAQA | | | | |
| QTAAVQ | | | | | QTGWVE | | | | |
| N | | | | | N | | | | |
| PLNGAV | 601 | 0.801 | 0.693 | 7.76 | PLNGAV | 1100 | 0.524 | 0.281 | 0.33 |
| HLYAQA | | | | | HLYAQA | | | | |
| QATQVQ | | | | | QTGRVK | | | | |
| N | | | | | N | | | | |
| RLDGAV | 602 | 0.861 | 0.693 | 8.37 | PLNGAV | 1101 | 0.435 | 0.281 | 0.33 |
| HLYAQA | | | | | HLYAQA | | | | |
| QTGWVQ | | | | | QTGRLQ | | | | |
| N | | | | | N | | | | |
| QLNGAV | 603 | 0.840 | 0.691 | 0.09 | PLNGSV | 1102 | 0.584 | 0.281 | 0.28 |
| HLYAQA | | | | | HLYAQA | | | | |
| QTGWVE | | | | | QTARVQ | | | | |
| N | | | | | N | | | | |
| PLNGAV | 604 | 0.278 | 0.691 | 0.19 | PLNGAV | 1103 | 0.378 | 0.280 | 0.19 |
| HLYAQA | | | | | HLYDQA | | | | |
| QVSSVK | | | | | QLSSVQ | | | | |
| N | | | | | N | | | | |
| PLNGAV | 605 | 0.582 | 0.690 | 94.87 | ALNGAV | 1104 | 0.550 | 0.280 | 0.09 |
| HLYAQA | | | | | HLYAQA | | | | |
| QLSSVQ | | | | | QTRLVQ | | | | |
| N | | | | | N | | | | |
| PLNGAV | 606 | 0.209 | 0.689 | 0.33 | PLNGAV | 1105 | 0.780 | 0.280 | 0.19 |
| HLYAQA | | | | | NLYAQA | | | | |
| QTGSGQ | | | | | QTAQVQ | | | | |
| N | | | | | N | | | | |
| PLNGAV | 607 | 0.441 | 0.686 | 0.09 | PLNGAV | 1106 | 0.461 | 0.279 | 0.09 |
| HLYAQA | | | | | HLYAQA | | | | |
| QLQPVQ | | | | | QLSSVQ | | | | |
| T | | | | | H | | | | |
| PINGAV | 608 | 0.805 | 0.686 | 0.09 | PLNGAV | 1107 | 0.799 | 0.279 | 0.09 |
| HLYAQA | | | | | HLYAQA | | | | |
| QLSSVQ | | | | | HTGPVQ | | | | |
| N | | | | | N | | | | |
| PINGAV | 609 | 0.313 | 0.684 | 0.09 | PLKGAV | 1108 | 0.872 | 0.279 | 0.09 |
| HLYAQA | | | | | HLYAQA | | | | |
| QTVAVQ | | | | | QTLSVQ | | | | |
| N | | | | | N | | | | |
| PLNGAV | 610 | 0.546 | 0.680 | 0.09 | ALNGAV | 1109 | 0.499 | 0.279 | 0.09 |
| HLYAQA | | | | | HLYAQA | | | | |
| QVSAVK | | | | | QKAWVQ | | | | |
| N | | | | | N | | | | |
| SLNGAV | 611 | 0.461 | 0.680 | 0.23 | PLNGAV | 1110 | 0.386 | 0.278 | 0.09 |
| HLYAQA | | | | | HLYAQA | | | | |
| QTVAVQ | | | | | QAGWVQ | | | | |
| N | | | | | T | | | | |
| PLNGAV | 612 | 0.882 | 0.680 | 22.29 | PLNGAV | 1111 | 0.709 | 0.278 | 0.19 |
| HLYAQA | | | | | HLYAQA | | | | |
| QTQAVQ | | | | | QTGLVQ | | | | |
| N | | | | | S | | | | |
| QLNGAV | 613 | 0.398 | 0.679 | 0.28 | PLNGAV | 1112 | 0.436 | 0.277 | 0.14 |
| HLYAQA | | | | | HLYAQA | | | | |
| QTAQVQ | | | | | QTGCVQ | | | | |
| N | | | | | I | | | | |
| PLNGAV | 614 | 0.309 | 0.676 | 0.14 | QLNGAV | 1113 | 0.529 | 0.276 | 1.26 |
| HLYDQA | | | | | HLYAQA | | | | |
| QTMSVQ | | | | | QPGWVQ | | | | |
| N | | | | | N | | | | |
| PLNGAV | 615 | 0.341 | 0.675 | 0.19 | PLNGAV | 1114 | 0.678 | 0.276 | 0.37 |
| HLYAQP | | | | | HLYAQA | | | | |
| QTGWVQ | | | | | QRPGVQ | | | | |
| K | | | | | N | | | | |
| PLNGAV | 616 | 0.855 | 0.672 | 30.47 | PLNGAV | 1115 | 0.265 | 0.276 | 0.09 |
| HLYAQA | | | | | HLYAQA | | | | |
| QVMPVQ | | | | | QTAAVQ | | | | |
| N | | | | | H | | | | |
| PLNGAV | 617 | 0.208 | 0.669 | 0.19 | PLNGAD | 1116 | 0.728 | 0.276 | 0.09 |
| HLYAQA | | | | | HLYAQA | | | | |
| QTVSVQ | | | | | QTMPVQ | | | | |
| K | | | | | N | | | | |
| PLNGAV | 618 | 0.410 | 0.664 | 0.09 | PLNGAV | 1117 | 0.198 | 0.276 | 0.33 |
| HLYAQA | | | | | HLYAKA | | | | |
| QTAWAQ | | | | | QTGWVQ | | | | |
| N | | | | | T | | | | |
| PLNGAV | 619 | 0.764 | 0.664 | 12.06 | QLNGAV | 1118 | 0.819 | 0.275 | 0.09 |
| HLYAQA | | | | | HLYAQA | | | | |
| QNALVQ | | | | | QKAWVQ | | | | |
| N | | | | | N | | | | |
| TLNGAV | 620 | 0.217 | 0.663 | 0.09 | PLNGAV | 1119 | 0.116 | 0.274 | 0.98 |
| HLYAQA | | | | | HLYAQA | | | | |
| QVSAVQ | | | | | QTGCDQ | | | | |
| N | | | | | N | | | | |
| PLKGAV | 621 | 0.611 | 0.663 | 0.09 | PLNGTV | 1120 | 0.513 | 0.274 | 0.09 |
| HLYAQA | | | | | HLYAQE | | | | |
| QTTPVQ | | | | | QTGSVQ | | | | |
| N | | | | | N | | | | |
| QLNGSV | 622 | 0.776 | 0.657 | 96.83 | PLNGAV | 1121 | 0.671 | 0.274 | 0.09 |
| HLYAQA | | | | | NLYAQA | | | | |
| QTGWVQ | | | | | QSSLVQ | | | | |
| N | | | | | N | | | | |
| SLNGAV | 623 | 0.307 | 0.650 | 0.09 | ALNGAV | 1122 | 0.296 | 0.274 | 0.23 |
| HLYAQA | | | | | HLYAQA | | | | |
| QVATVQ | | | | | QTGWVE | | | | |
| N | | | | | N | | | | |
| PLNGAV | 624 | 0.876 | 0.650 | 9.39 | PLNGTV | 1123 | 0.405 | 0.274 | 0.14 |
| HLYAQA | | | | | HLYAQA | | | | |
| QRMLVQ | | | | | QTGWVQ | | | | |
| N | | | | | Y | | | | |
| PLNGAV | 625 | 0.589 | 0.649 | 0.09 | PINGAV | 1124 | 0.373 | 0.273 | 0.75 |
| HLYAQA | | | | | HLYAQA | | | | |
| QTVAVK | | | | | QTGWVQ | | | | |
| N | | | | | K | | | | |
| PLNGAV | 626 | 0.523 | 0.649 | 0.14 | PLNGAV | 1125 | 0.820 | 0.273 | 0.09 |
| HLYDQA | | | | | HLYAQA | | | | |
| QTTSVQ | | | | | QTGRVR | | | | |
| N | | | | | N | | | | |
| PLNGAV | 627 | 0.725 | 0.647 | 11.92 | PLNGAV | 1126 | 0.590 | 0.272 | 0.37 |
| HLYAQA | | | | | HLYAQA | | | | |
| QRQLVQ | | | | | QTGRDQ | | | | |
| N | | | | | N | | | | |
| PLNGAV | 628 | 0.754 | 0.645 | 28.79 | QLNGAV | 1127 | 0.409 | 0.272 | 0.23 |
| HLYAQA | | | | | HLYAQA | | | | |
| QTLGVQ | | | | | QSALVQ | | | | |
| N | | | | | N | | | | |
| PLNGAV | 629 | 0.889 | 0.645 | 0.09 | PLNGVV | 1128 | 0.422 | 0.272 | 0.09 |
| HLYAQA | | | | | HLYAQA | | | | |
| QLGPVQ | | | | | QTGWVQ | | | | |
| T | | | | | K | | | | |
| PLNGGV | 630 | 0.554 | 0.644 | 0.14 | PLNGAV | 1129 | 0.534 | 0.272 | 0.14 |
| HLYAQA | | | | | HLYAQA | | | | |
| QTGWVQ | | | | | HTGWGQ | | | | |
| D | | | | | N | | | | |
| PLNGAV | 631 | 0.205 | 0.640 | 0.98 | PLNGDV | 1130 | 0.638 | 0.272 | 0.09 |
| HLYAQA | | | | | HLYAQA | | | | |
| QTGSVK | | | | | QRSLVQ | | | | |
| N | | | | | N | | | | |
| PLNGAV | 632 | 0.332 | 0.635 | 0.09 | PLNGNV | 1131 | 0.711 | 0.272 | 0.09 |
| NLYAQA | | | | | HLYAQA | | | | |
| QLASVQ | | | | | QTVWVQ | | | | |
| N | | | | | N | | | | |
| PLNGAV | 633 | 0.307 | 0.634 | 0.14 | PLNGAV | 1132 | 0.332 | 0.272 | 0.23 |
| HLYDQA | | | | | HLYAQA | | | | |
| QVSSVQ | | | | | PTGWVQ | | | | |
| N | | | | | H | | | | |
| PLNGAV | 634 | 0.355 | 0.632 | 0.14 | PLNGAV | 1133 | 0.725 | 0.271 | 0.23 |
| HLYAQA | | | | | HLYSQA | | | | |
| QTMSDQ | | | | | QTGWGQ | | | | |
| N | | | | | N | | | | |
| PLNGAV | 635 | 0.337 | 0.630 | 17.48 | ALNGSV | 1134 | 0.729 | 0.271 | 0.09 |
| HLYAQA | | | | | HLYAQA | | | | |
| QTGWVQ | | | | | QTGWVQ | | | | |
| K | | | | | T | | | | |
| PLNGAV | 636 | 0.203 | 0.630 | 0.09 | PLNGAV | 1135 | 0.347 | 0.271 | 0.09 |
| HLYAQA | | | | | QLYAQA | | | | |
| QLASVK | | | | | QRSTVQ | | | | |
| N | | | | | N | | | | |
| PLNGGV | 637 | 0.490 | 0.628 | 0.23 | PLNGTV | 1136 | 0.434 | 0.271 | 0.28 |
| HLYAQA | | | | | HLYAQA | | | | |
| QTGWGQ | | | | | QTGTVQ | | | | |
| N | | | | | N | | | | |
| QLNGSV | 638 | 0.844 | 0.627 | 0.09 | PLNGTV | 1137 | 0.549 | 0.271 | 0.37 |
| HLYAQA | | | | | HLYAQA | | | | |
| QTGWVQ | | | | | QTGWVQ | | | | |
| T | | | | | I | | | | |

+0 TABLE 24
NGS fold-enrichment of TTD-001 matured AAV capsid variants brain
and DRG of cynomolgus macaques and the brain of marmosets

| | | Brain of | | DRG of | | | |
|---|---|---|---|---|---|---|---|
| | | cynomolgus | | cynomolgus | | Brain | |
| | | macaques | | macaques | | of marmosets | |
| | | Fold | Fold | Fold | Fold | Fold | Fold |
| | | change | change | change | change | change | change |
| | SEQ | relative | relative | relative | relative | relative | relative |
| | ID | to | to | to | to | to | to |
| Sequence | NO | AAV9 | TTD-001 | AAV9 | TTD-001 | AAV9 | TTD-001 |
| ALNGAVHLYAQAQTG | 1122 | 12.707 | 0.274 | 0.000 | 0.000 | 420.579 | 571.155 |
| WVEN | | | | | | | |
| PINGAVHLYAQAQTG | 40 | 8.716 | 0.188 | 2.100 | 13.718 | 573.779 | 779.203 |
| WVEN | | | | | | | |
| PLNGAVHLNAQAQTG | 41 | 0.919 | 0.020 | 2.175 | 14.212 | 677.878 | 920.572 |
| WVEN | | | | | | | |
| PLNGAVHLYAQAQSG | 42 | 5.505 | 0.119 | 0.000 | 0.000 | 263.098 | 357.292 |
| WVEN | | | | | | | |
| PLNGAVHLYAQAQTA | 43 | 8.721 | 0.188 | 0.827 | 5.405 | 236.026 | 320.528 |
| WVEN | | | | | | | |
| PLNGAVHLYAQAQTG | 44 | 4.126 | 0.089 | 0.245 | 1.603 | 475.164 | 645.282 |
| CVEN | | | | | | | |
| PLNGAVHLYAQAQTG | 871 | 18.851 | 0.406 | 0.491 | 3.206 | 288.900 | 392.332 |
| GVEN | | | | | | | |
| PLNGAVHLYAQAQTG | 45 | 5.050 | 0.109 | 0.000 | 0.000 | 541.666 | 735.593 |
| LVEN | | | | | | | |
| PLNGAVHLYAQAQTG | 818 | 20.878 | 0.450 | 2.856 | 18.662 | 571.096 | 775.559 |
| SVEN | | | | | | | |
| PLNGAVHLYAQAQTG | 804 | 21.437 | 0.462 | 1.362 | 8.901 | 381.679 | 518.327 |
| WVEN | | | | | | | |
| PLNGSVHLYAQAQTG | 499 | 43.595 | 0.939 | 2.334 | 15.248 | 490.137 | 665.615 |
| WVEN | | | | | | | |
| PVNGAVHLYAQAQTG | 46 | 6.311 | 0.136 | 0.000 | 0.000 | 506.376 | 687.669 |
| WVEN | | | | | | | |
| QLNGAVHLYAQAQTG | 603 | 32.086 | 0.691 | 0.000 | 0.000 | 290.854 | 394.985 |
| WVEN | | | | | | | |
| SLNGAVHLYAQAQTG | 47 | 8.707 | 0.188 | 2.111 | 13.795 | 302.059 | 410.202 |
| WVEN | | | | | | | |
| TLNGAVHLYAQAQTG | 48 | 0.707 | 0.015 | 0.624 | 4.074 | 254.330 | 345.385 |
| WVEN | | | | | | | |
| ALNGAVHLYAQAQTG | 819 | 20.878 | 0.450 | 0.667 | 4.356 | 232.682 | 315.986 |
| WVHN | | | | | | | |
| PHNGAVHLYAQAQTG | 49 | 3.604 | 0.078 | 4.410 | 28.816 | 177.855 | 241.530 |
| WVHN | | | | | | | |
| PINGAVHLYAQAQTG | 50 | 6.387 | 0.138 | 1.083 | 7.076 | 124.477 | 169.043 |
| WVHN | | | | | | | |
| PLKGAVHLYAQAQTG | 51 | 0.986 | 0.021 | 0.516 | 3.368 | 118.166 | 160.472 |
| WVHN | | | | | | | |
| PLNGAAHLYAQAQTG | 52 | 0.757 | 0.016 | 1.024 | 6.693 | 91.230 | 123.892 |
| WVHN | | | | | | | |
| PLNGADHLYAQAQTG | 53 | 0.842 | 0.018 | 0.540 | 3.529 | 15.514 | 21.069 |
| WVHN | | | | | | | |
| PLNGAGHLYAQAQTG | 54 | 1.198 | 0.026 | 1.451 | 9.479 | 106.338 | 144.409 |
| WVHN | | | | | | | |
| PLNGALHLYAQAQTG | 55 | 2.023 | 0.044 | 0.000 | 0.000 | 148.895 | 202.202 |
| WVHN | | | | | | | |
| PLNGAVDLYAQAQTG | 56 | 3.104 | 0.067 | 0.000 | 0.000 | 149.296 | 202.747 |
| WVHN | | | | | | | |
| PLNGAVHHYAQAQTG | 57 | 2.959 | 0.064 | 1.184 | 7.735 | 162.209 | 220.283 |
| WVHN | | | | | | | |
| PLNGAVHIYAQAQTG | 58 | 2.284 | 0.049 | 0.000 | 0.000 | 160.204 | 217.560 |
| WVHN | | | | | | | |
| PLNGAVHLDAQAQTG | 59 | 0.667 | 0.014 | 0.333 | 2.175 | 298.308 | 405.108 |
| WVHN | | | | | | | |
| PLNGAVHLNAQAQTG | 60 | 2.297 | 0.050 | 2.821 | 18.432 | 417.906 | 567.525 |
| WVHN | | | | | | | |
| PLNGAVHLSAQAQTG | 61 | 1.946 | 0.042 | 1.987 | 12.982 | 427.101 | 580.011 |
| WVHN | | | | | | | |
| PLNGAVHLYAKAQTG | 62 | 7.514 | 0.162 | 0.000 | 0.000 | 75.629 | 102.705 |
| WVHN | | | | | | | |
| PLNGAVHLYAQAKTG | 63 | 2.441 | 0.053 | 0.998 | 6.522 | 78.923 | 107.179 |
| WVHN | | | | | | | |
| PLNGAVHLYAQAQAG | 64 | 1.527 | 0.033 | 0.000 | 0.000 | 132.644 | 180.133 |
| WVHN | | | | | | | |
| PLNGAVHLYAQAQRG | 65 | 4.707 | 0.101 | 0.000 | 0.000 | 24.765 | 33.632 |
| WVHN | | | | | | | |
| PLNGAVHLYAQAQSG | 66 | 3.622 | 0.078 | 0.000 | 0.000 | 117.858 | 160.053 |
| WVHN | | | | | | | |
| PLNGAVHLYAQAQTA | 946 | 16.279 | 0.351 | 0.452 | 2.953 | 234.444 | 318.380 |
| WVHN | | | | | | | |
| PLNGAVHLYAQAQTG | 67 | 4.347 | 0.094 | 0.356 | 2.328 | 255.533 | 347.018 |
| CVHN | | | | | | | |
| PLNGAVHLYAQAQTG | 491 | 44.261 | 0.954 | 1.261 | 8.238 | 175.856 | 238.815 |
| GVHN | | | | | | | |
| PLNGAVHLYAQAQTG | 68 | 6.977 | 0.150 | 0.000 | 0.000 | 140.966 | 191.435 |
| LVHN | | | | | | | |
| PLNGAVHLYAQAQTG | 576 | 34.946 | 0.753 | 2.147 | 14.025 | 187.304 | 254.363 |
| SVHN | | | | | | | |
| PLNGAVHLYAQAQTG | 755 | 23.437 | 0.505 | 0.865 | 5.655 | 192.126 | 260.911 |
| WVHN | | | | | | | |
| PLNGAVHLYAQAQVS | 69 | 8.212 | 0.177 | 0.000 | 0.000 | 319.448 | 433.817 |
| AVHN | | | | | | | |
| PLNGAVHLYAQEQTG | 70 | 2.986 | 0.064 | 0.000 | 0.000 | 93.114 | 126.451 |
| WVHN | | | | | | | |
| PLNGAVHLYAQGQTG | 71 | 1.725 | 0.037 | 0.000 | 0.000 | 26.926 | 36.566 |
| WVHN | | | | | | | |
| PLNGAVHLYDQAQTG | 72 | 1.514 | 0.033 | 0.279 | 1.822 | 142.794 | 193.917 |
| WVHN | | | | | | | |
| PLNGAVHLYGQAQTG | 73 | 1.401 | 0.030 | 0.000 | 0.000 | 116.707 | 158.491 |
| WVHN | | | | | | | |
| PLNGAVHLYSQAQTG | 74 | 9.806 | 0.211 | 0.000 | 0.000 | 100.716 | 136.775 |
| WVHN | | | | | | | |
| PLNGAVHRYAQAQTG | 75 | 5.991 | 0.129 | 0.000 | 0.000 | 13.869 | 18.834 |
| WVHN | | | | | | | |
| PLNGAVHVYAQAQTG | 76 | 2.959 | 0.064 | 0.000 | 0.000 | 159.742 | 216.933 |
| WVHN | | | | | | | |
| PLNGAVNLYAQAQTG | 77 | 2.387 | 0.051 | 0.631 | 4.121 | 78.989 | 107.268 |
| WVHN | | | | | | | |
| PLNGAVPLYAQAQTG | 78 | 2.946 | 0.063 | 0.774 | 5.060 | 124.967 | 169.708 |
| WVHN | | | | | | | |
| PLNGAVQLYAQAQTG | 79 | 2.338 | 0.050 | 1.085 | 7.091 | 105.426 | 143.170 |
| WVHN | | | | | | | |
| PLNGGVHLYAQAQTG | 979 | 15.473 | 0.333 | 0.626 | 4.090 | 185.552 | 251.984 |
| WVHN | | | | | | | |
| PLNGSVHLYAQAQTG | 703 | 25.824 | 0.556 | 1.283 | 8.381 | 360.426 | 489.465 |
| WVHN | | | | | | | |
| PLNGTVHLYAQAQTG | 80 | 10.315 | 0.222 | 0.000 | 0.000 | 159.224 | 216.229 |
| WVHN | | | | | | | |
| PRNGAVHLYAQAQTG | 81 | 2.842 | 0.061 | 1.016 | 6.636 | 163.614 | 222.192 |
| WVHN | | | | | | | |
| PVNGAVHLYAQAQTG | 82 | 8.023 | 0.173 | 0.761 | 4.971 | 402.937 | 547.197 |
| WVHN | | | | | | | |
| QLNGAVHLYAQAQTG | 816 | 21.018 | 0.453 | 0.794 | 5.185 | 344.539 | 467.890 |
| WVHN | | | | | | | |
| SLNGAVHLYAQAQTG | 83 | 8.378 | 0.181 | 1.286 | 8.399 | 211.470 | 287.181 |
| WVHN | | | | | | | |
| TLNGAVHLYAQAQTG | 84 | 1.270 | 0.027 | 0.252 | 1.648 | 136.758 | 185.720 |
| WVHN | | | | | | | |
| ALNGAVHLYAQAQTG | 1081 | 13.477 | 0.290 | 0.084 | 0.546 | 9.629 | 13.077 |
| WVKN | | | | | | | |
| ALNGAVNLYAQAQTG | 85 | 4.203 | 0.091 | 0.000 | 0.000 | 3.919 | 5.323 |
| WVKN | | | | | | | |
| KLNGAVHLYAQAQTG | 86 | 7.153 | 0.154 | 0.000 | 0.000 | 9.576 | 13.004 |
| WVKN | | | | | | | |
| PHNGAVHLYAQAQTG | 87 | 1.248 | 0.027 | 0.378 | 2.467 | 5.661 | 7.688 |
| WVKN | | | | | | | |
| PINGAVHLYAQAQTG | 88 | 7.644 | 0.165 | 0.143 | 0.933 | 7.560 | 10.267 |
| WVKN | | | | | | | |
| PLKGAVHLYAQAQTG | 89 | 0.748 | 0.016 | 0.103 | 0.675 | 7.088 | 9.626 |
| WVKN | | | | | | | |
| PLNAAVHLYAQAQTG | 90 | 2.473 | 0.053 | 0.000 | 0.000 | 18.662 | 25.343 |
| WVKN | | | | | | | |
| PLNGAAHLYAQAQTG | 91 | 0.901 | 0.019 | 0.390 | 2.547 | 5.894 | 8.004 |
| WVKN | | | | | | | |
| PLNGADHLYAQAQTG | 92 | 3.270 | 0.070 | 0.316 | 2.064 | 0.970 | 1.317 |
| WVKN | | | | | | | |
| PLNGAGHLYAQAQTG | 93 | 0.378 | 0.008 | 0.209 | 1.367 | 11.306 | 15.354 |
| WVKN | | | | | | | |
| PLNGALHLYAQAQTG | 859 | 19.306 | 0.416 | 0.059 | 0.387 | 19.870 | 26.984 |
| WVKN | | | | | | | |
| PLNGAVDLYAQAQTG | 94 | 0.937 | 0.020 | 0.000 | 0.000 | 5.016 | 6.812 |
| WVKN | | | | | | | |
| PLNGAVHHYAQAQTG | 95 | 1.572 | 0.034 | 0.122 | 0.800 | 8.227 | 11.173 |
| WVKN | | | | | | | |
| PLNGAVHIYAQAQTG | 96 | 11.752 | 0.253 | 0.310 | 2.024 | 10.015 | 13.600 |
| WVKN | | | | | | | |
| PLNGAVHLDAQAQTG | 97 | 0.455 | 0.010 | 0.132 | 0.864 | 14.604 | 19.832 |
| WVKN | | | | | | | |
| PLNGAVHLNAQAQTG | 98 | 1.725 | 0.037 | 0.739 | 4.830 | 21.040 | 28.572 |
| WVKN | | | | | | | |
| PLNGAVHLSAQAQTG | 99 | 0.653 | 0.014 | 0.523 | 3.415 | 16.268 | 22.092 |
| WVKN | | | | | | | |
| PLNGAVHLYAEAQTG | 100 | 0.752 | 0.016 | 0.000 | 0.000 | 0.825 | 1.120 |
| WVKN | | | | | | | |
| PLNGAVHLYAHAQTG | 101 | 8.658 | 0.187 | 0.345 | 2.253 | 1.734 | 2.355 |
| WVKN | | | | | | | |
| PLNGAVHLYAKAQTG | 649 | 28.559 | 0.615 | 0.278 | 1.817 | 1.532 | 2.081 |
| WVKN | | | | | | | |
| PLNGAVHLYALAQTG | 102 | 2.311 | 0.050 | 0.000 | 0.000 | 9.892 | 13.433 |
| WVKN | | | | | | | |
| PLNGAVHLYAPAQTG | 103 | 3.766 | 0.081 | 0.000 | 0.000 | 5.697 | 7.737 |
| WVKN | | | | | | | |
| PLNGAVHLYAQAETG | 104 | 0.360 | 0.008 | 0.213 | 1.394 | 2.738 | 3.718 |
| WVKN | | | | | | | |
| PLNGAVHLYAQAQKG | 105 | 7.865 | 0.169 | 0.099 | 0.648 | 1.486 | 2.018 |
| WVKN | | | | | | | |
| PLNGAVHLYAQAQLS | 566 | 36.293 | 0.782 | 0.000 | 0.000 | 134.753 | 182.997 |
| PVKN | | | | | | | |
| PLNGAVHLYAQAQLS | 960 | 15.955 | 0.344 | 0.000 | 0.000 | 51.408 | 69.813 |
| SVKN | | | | | | | |
| PLNGAVHLYAQAQPG | 106 | 10.171 | 0.219 | 0.000 | 0.000 | 13.928 | 18.914 |
| WVKN | | | | | | | |
| PLNGAVHLYAQAQSG | 107 | 3.450 | 0.074 | 0.000 | 0.000 | 7.922 | 10.758 |
| WVKN | | | | | | | |
| PLNGAVHLYAQAQSS | 108 | 11.748 | 0.253 | 0.000 | 0.000 | 8.691 | 11.802 |
| LVKN | | | | | | | |
| PLNGAVHLYAQAQSS | 109 | 5.856 | 0.126 | 0.169 | 1.107 | 10.452 | 14.194 |
| SVKN | | | | | | | |
| PLNGAVHLYAQAQTA | 110 | 4.473 | 0.096 | 0.000 | 0.000 | 14.173 | 19.247 |
| CVKN | | | | | | | |
| PLNGAVHLYAQAQTA | 763 | 23.248 | 0.501 | 0.000 | 0.000 | 11.433 | 15.526 |
| SVKN | | | | | | | |
| PLNGAVHLYAQAQTA | 828 | 20.599 | 0.444 | 0.333 | 2.174 | 6.667 | 9.054 |
| WVKN | | | | | | | |
| PLNGAVHLYAQAQTE | 111 | 0.721 | 0.016 | 0.000 | 0.000 | 14.566 | 19.781 |
| WVKN | | | | | | | |
| PLNGAVHLYAQAQTG | 112 | 8.239 | 0.178 | 0.000 | 0.000 | 10.794 | 14.659 |
| AVKN | | | | | | | |
| PLNGAVHLYAQAQTG | 113 | 8.144 | 0.175 | 0.222 | 1.452 | 14.865 | 20.187 |
| CVKN | | | | | | | |
| PLNGAVHLYAQAQTG | 529 | 40.644 | 0.876 | 0.167 | 1.092 | 8.407 | 11.417 |
| GVKN | | | | | | | |
| PLNGAVHLYAQAQTG | 114 | 10.090 | 0.217 | 0.145 | 0.945 | 10.946 | 14.864 |
| LVKN | | | | | | | |
| PLNGAVHLYAQAQTG | 1100 | 13.059 | 0.281 | 0.000 | 0.000 | 2.607 | 3.541 |
| RVKN | | | | | | | |
| PLNGAVHLYAQAQTG | 631 | 29.707 | 0.640 | 0.516 | 3.369 | 7.169 | 9.735 |
| SVKN | | | | | | | |
| PLNGAVHLYAQAQTG | 765 | 23.167 | 0.499 | 0.260 | 1.700 | 10.937 | 14.852 |
| WVKN | | | | | | | |
| PLNGAVHLYAQAQTL | 720 | 25.032 | 0.539 | 1.771 | 11.569 | 10.981 | 14.913 |
| SVKN | | | | | | | |
| PLNGAVHLYAQAQTR | 1033 | 14.369 | 0.310 | 1.308 | 8.546 | 1.210 | 1.643 |
| WVKN | | | | | | | |
| PLNGAVHLYAQAQTS | 700 | 26.099 | 0.562 | 0.000 | 0.000 | 29.844 | 40.528 |
| SVKN | | | | | | | |
| PLNGAVHLYAQAQTS | 1037 | 14.347 | 0.309 | 0.000 | 0.000 | 12.484 | 16.953 |
| TVKN | | | | | | | |
| PLNGAVHLYAQAQTS | 115 | 4.212 | 0.091 | 0.000 | 0.000 | 34.651 | 47.056 |
| WVKN | | | | | | | |
| PLNGAVHLYAQAQTV | 625 | 30.131 | 0.649 | 0.000 | 0.000 | 22.666 | 30.781 |
| AVKN | | | | | | | |
| PLNGAVHLYAQAQTV | 325 | 69.266 | 1.492 | 0.231 | 1.508 | 22.335 | 30.332 |
| SVKN | | | | | | | |
| PLNGAVHLYAQAQTV | 771 | 22.784 | 0.491 | 0.000 | 0.000 | 1.612 | 2.189 |
| WVKN | | | | | | | |
| PLNGAVHLYAQAQVS | 610 | 31.581 | 0.680 | 0.354 | 2.310 | 21.595 | 29.326 |
| AVKN | | | | | | | |
| PLNGAVHLYAQAQVS | 558 | 37.158 | 0.801 | 0.000 | 0.000 | 40.525 | 55.033 |
| PVKN | | | | | | | |
| PLNGAVHLYAQEQTG | 116 | 7.694 | 0.166 | 0.000 | 0.000 | 1.548 | 2.102 |
| WVKN | | | | | | | |
| PLNGAVHLYAQSQTG | 117 | 7.014 | 0.151 | 0.000 | 0.000 | 5.931 | 8.054 |
| WVKN | | | | | | | |
| PLNGAVHLYDQAQTG | 118 | 2.761 | 0.059 | 0.146 | 0.956 | 7.745 | 10.518 |
| WVKN | | | | | | | |
| PLNGAVHLYEQAQTG | 119 | 7.658 | 0.165 | 0.000 | 0.000 | 7.124 | 9.675 |
| WVKN | | | | | | | |
| PLNGAVHLYGQAQTG | 120 | 0.874 | 0.019 | 0.000 | 0.000 | 5.745 | 7.802 |
| WVKN | | | | | | | |
| PLNGAVHLYSQAQTG | 121 | 6.910 | 0.149 | 0.000 | 0.000 | 11.682 | 15.865 |
| LVKN | | | | | | | |
| PLNGAVHLYSQAQTG | 122 | 7.536 | 0.162 | 0.245 | 1.599 | 4.415 | 5.996 |
| WVKN | | | | | | | |
| PLNGAVHLYTQAQTG | 123 | 0.595 | 0.013 | 0.166 | 1.086 | 10.157 | 13.793 |
| WVKN | | | | | | | |
| PLNGAVHPYAQAQTG | 124 | 0.788 | 0.017 | 0.178 | 1.162 | 3.527 | 4.790 |
| WVKN | | | | | | | |
| PLNGAVHRSLQAQTG | 125 | 0.153 | 0.003 | 0.449 | 2.931 | 7.938 | 10.780 |
| WVKN | | | | | | | |
| PLNGAVHRYAQAQTG | 126 | 1.878 | 0.040 | 0.000 | 0.000 | 2.446 | 3.322 |
| WVKN | | | | | | | |
| PLNGAVHVYAQAQTG | 127 | 1.937 | 0.042 | 0.123 | 0.802 | 7.871 | 10.689 |
| WVKN | | | | | | | |
| PLNGAVLLYAQAQTG | 128 | 4.149 | 0.089 | 0.211 | 1.379 | 3.878 | 5.266 |
| WVKN | | | | | | | |
| PLNGAVNLYAQAQTG | 129 | 3.505 | 0.076 | 0.000 | 0.000 | 1.145 | 1.555 |
| CVKN | | | | | | | |
| PLNGAVNLYAQAQTG | 130 | 4.586 | 0.099 | 0.262 | 1.710 | 2.124 | 2.884 |
| WVKN | | | | | | | |
| PLNGAVNLYDQAQTG | 131 | 2.486 | 0.054 | 0.000 | 0.000 | 9.468 | 12.858 |
| WVKN | | | | | | | |
| PLNGAVPLYAQAQTG | 132 | 1.622 | 0.035 | 0.000 | 0.000 | 7.002 | 9.509 |
| WVKN | | | | | | | |
| PLNGAVQLYAQAQTG | 133 | 2.014 | 0.043 | 0.381 | 2.487 | 11.888 | 16.145 |
| WVKN | | | | | | | |
| PLNGAVRSTAQAQTG | 134 | 0.505 | 0.011 | 0.662 | 4.326 | 24.950 | 33.883 |
| WVKN | | | | | | | |
| PLNGAVSLRAQAQTG | 135 | 0.725 | 0.016 | 1.267 | 8.277 | 6.291 | 8.543 |
| WVKN | | | | | | | |
| PLNGAVSSRAQAQTG | 136 | 0.739 | 0.016 | 1.091 | 7.130 | 19.478 | 26.452 |
| WVKN | | | | | | | |
| PLNGDVHLYAQAQTG | 1200 | 2.905 | 0.063 | 0.000 | 0.000 | 10.919 | 14.829 |
| CVKN | | | | | | | |
| PLNGDVHLYAQAQTG | 1201 | 2.559 | 0.055 | 0.235 | 1.539 | 9.737 | 13.224 |
| WVKN | | | | | | | |
| PLNGGVHLYAQAQTG | 864 | 19.077 | 0.411 | 0.292 | 1.905 | 4.576 | 6.214 |
| WVKN | | | | | | | |
| PLNGPVHLYAQAQTG | 1202 | 2.216 | 0.048 | 0.000 | 0.000 | 5.169 | 7.019 |
| WVKN | | | | | | | |
| PLNGSVHLYAQAQTG | 1203 | 5.707 | 0.123 | 0.000 | 0.000 | 21.281 | 28.900 |
| CVKN | | | | | | | |
| PLNGSVHLYAQAQTG | 791 | 22.050 | 0.475 | 0.184 | 1.202 | 13.110 | 17.803 |
| WVKN | | | | | | | |
| PLNGTVHLYAQAQTG | 978 | 15.482 | 0.334 | 0.000 | 0.000 | 17.576 | 23.868 |
| WVKN | | | | | | | |
| PLNSAVHLYAQAQTG | 1204 | 1.468 | 0.032 | 0.000 | 0.000 | 3.674 | 4.989 |
| WVKN | | | | | | | |
| PLSGAVHLYAQAQTG | 1205 | 0.680 | 0.015 | 0.000 | 0.000 | 8.111 | 11.015 |
| WVKN | | | | | | | |
| PPNGAVHLYAQAQTG | 1206 | 0.829 | 0.018 | 0.546 | 3.567 | 9.008 | 12.233 |
| WVKN | | | | | | | |
| PRNGAVHLYAQAQTG | 1207 | 1.194 | 0.026 | 0.421 | 2.751 | 9.143 | 12.417 |
| WVKN | | | | | | | |
| PVNGAVHLYAQAQTG | 1208 | 8.167 | 0.176 | 0.145 | 0.946 | 11.979 | 16.268 |
| WVKN | | | | | | | |
| QLNGAVHIYAQAQTG | 1209 | 6.982 | 0.150 | 0.000 | 0.000 | 14.405 | 19.563 |
| WVKN | | | | | | | |
| QLNGAVHLYAQAQTG | 1210 | 2.446 | 0.053 | 0.000 | 0.000 | 14.453 | 19.627 |
| CVKN | | | | | | | |
| QLNGAVHLYAQAQTG | 1211 | 7.518 | 0.162 | 0.000 | 0.000 | 1.613 | 2.190 |
| LVKN | | | | | | | |
| QLNGAVHLYAQAQTG | 966 | 15.815 | 0.341 | 1.130 | 7.380 | 3.272 | 4.443 |
| SVKN | | | | | | | |
| QLNGAVHLYAQAQTG | 1032 | 14.378 | 0.310 | 0.137 | 0.893 | 10.495 | 14.253 |
| WVKN | | | | | | | |
| QLNGAVHLYDQAQTG | 1212 | 2.378 | 0.051 | 0.000 | 0.000 | 1.224 | 1.663 |
| WVKN | | | | | | | |
| RLNGAVHLYAQAQTG | 1213 | 3.131 | 0.067 | 0.000 | 0.000 | 4.894 | 6.646 |
| WVKN | | | | | | | |
| SINGAVHLYAQAQTG | 1214 | 1.234 | 0.027 | 0.409 | 2.671 | 4.660 | 6.328 |
| WVKN | | | | | | | |
| SLNGAVHLYAQAQTG | 1215 | 6.104 | 0.132 | 0.328 | 2.143 | 11.122 | 15.104 |
| WVKN | | | | | | | |
| SLNGAVNLYAQAQTG | 1216 | 1.387 | 0.030 | 0.833 | 5.444 | 5.215 | 7.083 |
| WVKN | | | | | | | |
| TLNGAVHLYAQAQTG | 1217 | 2.176 | 0.047 | 0.108 | 0.707 | 5.355 | 7.272 |
| WVKN | | | | | | | |
| TLNGAVNLYAQAQTG | 1218 | 1.333 | 0.029 | 0.000 | 0.000 | 1.292 | 1.754 |
| WVKN | | | | | | | |
| PLNGAVHHYAQAQTG | 1219 | 0.937 | 0.020 | 0.000 | 0.000 | 982.466 | 1334.208 |
| WVPN | | | | | | | |
| PLNGAVHLNAQAQTG | 1220 | 3.698 | 0.080 | 3.072 | 20.072 | 5448.821 | 7399.606 |
| WVPN | | | | | | | |
| PLNGAVHLSAQAQTG | 1221 | 3.356 | 0.072 | 3.362 | 21.966 | 5527.158 | 7505.989 |
| WVPN | | | | | | | |
| PLNGAVHLYAQAQTG | 1222 | 8.959 | 0.193 | 0.969 | 6.329 | 3019.591 | 4100.664 |
| CVPN | | | | | | | |
| PLNGAVHLYAQAQTG | 314 | 71.770 | 1.546 | 2.071 | 13.534 | 2408.300 | 3270.518 |
| WVPN | | | | | | | |
| PLNGAVNLYAQAQTG | 1223 | 5.356 | 0.115 | 1.809 | 11.822 | 2103.432 | 2856.501 |
| WVPN | | | | | | | |
| PLNGTVHLYAQAQTG | 885 | 18.270 | 0.394 | 0.000 | 0.000 | 4688.758 | 6367.425 |
| WVPN | | | | | | | |
| PVNGAVHLYAQAQTG | 1016 | 14.568 | 0.314 | 0.000 | 0.000 | 1269.496 | 1724.000 |
| WVPN | | | | | | | |
| QLNGAVHLYAQAQTG | 648 | 28.572 | 0.616 | 0.000 | 0.000 | 14152.524 | 19219.405 |
| WVPN | | | | | | | |
| SLNGAVHLYAQAQTG | 1058 | 13.914 | 0.300 | 1.876 | 12.256 | 1800.081 | 2444.545 |
| WVPN | | | | | | | |
| PLNGAVHLYAQAQTG | 476 | 46.410 | 1 | 0.153 | 1 | 0.736 | 1 |
| WVQN | | | | | | | |
| AQAQAQTGWVQN | 1224 | 1 | 0.0215 | 1 | 6.533 | 1 | 1.358 |

### Example 4. Dose-Response Evaluation of TTD-001 in Non-Human Primates (NHPs)

[1939] This Example investigates the minimal dose of an AAV particle comprising a TTD-001 capsid variant (SEQ ID NO: 3623 (DNA) and 3636 (amino acid), comprising SEQ ID NO: 3648)) that is sufficient to achieve near-physiological expression of a payload, e.g., a single stranded payload, in the central nervous system of adult cynomolgus macaques (Macaca fascicularis) via intravenous systemic delivery.

[1940] AAV particles comprising the TTD-001 capsid variant comprising a single stranded viral genome encoding a hemagglutinin (HA)-tagged NHP protein under the control of a ubiquitous CBA promoter were injected intravenously into adult male NHPs (cynomolgus macaque) (n=3, 5-7 years of age) at various doses spanning a 30-fold range, which included 6.7e11 VG/kg, 2e12 VG/kg, 6.7e12 VG/kg, and 2e13 VG·kg. The in-life period was 28 days and then various CNS and peripheral tissues were collected for measuring transgene mRNA expression by RT-qPCR, viral DNA levels by ddPCR, transgene protein expression by ELISA, and biodistribution by immunohistochemistry (staining with an anti-HA antibody).

[1941] Widespread transgene expression was detected in the spinal cord and the brain the NHPs at doses of 2e12 VG/kg and above, especially in the putamen, thalamus, globus pallidus and brainstem (Tables 25-27). Viral DNA and mRNA were readily detectable in all NHPs and showed a consistent dose response (Table 25, Table 26).

[1942] More specifically, in the brain, dose-dependent distribution of the AAV particles comprising the TTD-001 capsid was observed in the cortical regions (frontal, motor, and somatosensory), caudate, putamen, thalamus, substantia nigra, globus pallidus, hippocampus, amygdala, hypothalamus, cerebellar cortex, and dentate nucleus. Additionally, for each dose administered, there was comparable distribution of the AAV particles comprising the TTD-001 capsid in each brain region, including the cortex as well as the deeper brain regions such as the caudate, putamen, thalamus, substantia nigra, globus pallidus, hippocampus, amygdala, hypothalamus, and dentate nucleus (Table 25).

[1943] With respect to the spinal cord, dose-dependent distribution of the AAV particles comprising the TTD-001 capsid was observed in the cervical, thoracic, and lumbar spinal cord regions and the relative distribution across all these regions was similar for each dosing group. As shown in Table 25, low biodistribution was measured in the DRG, but a dose-dependent distribution of the AAV particles comprising the TTD-001 capsid was observed in the cervical, thoracic, and lumbar DRG regions and the relative distribution across all DRG regions was similar for each dosing group.

[1944] With respect to the peripheral tissues, a dose-dependent distribution of the AAV particles comprising the TTD-001 capsid was observed in the liver, hear, and the vastus lateralis (muscle) (Table 25).

TABLE 25
Quantification of viral genomes (biodistribution) by ddPCR following intravenous
administration of various doses of AAV particles comprising a TTD-001 capsid

| | Quantification of viral genomes in the Brain (VG/diploid cell) | | | | | | |
|---|---|---|---|---|---|---|---|
| Dose | Frontal | Motor | Somatosensory | | | | Dentate |
| (VG/kg) | Cortex | Cortex | Cortex | Caudate | Putamen | Thalamus | Nucleus |
| 6.7e11 | 0.01 | 0.11 | 0.07 | 0.16 | 0.13 | 0.17 | 0.03 |
| 2e12 | 2.0 | 1.72 | 0.92 | 1.27 | 0.89 | 1.16 | 0.42 |
| 6.7e12 | 4.5 | 4.20 | 3.44 | 3.44 | 2.74 | 3.04 | 2.27 |
| 2e13 | 6.7 | 7.50 | 3.04 | 6.32 | 4.94 | 6.34 | 4.14 |

| Dose | Substantia | Globus | | | | Cerebellar |
|---|---|---|---|---|---|---|
| (VG/kg) | Nigra | Pallidus | Hippocampus | Amygdala | Hypothalamus | Cortex |
| 6.7e11 | 0.12 | 0.10 | 0.1 | 0.16 | 0.14 | 0.02 |
| 2e12 | 1.12 | 1.28 | 2.1 | 2.83 | 1.77 | 0.13 |
| 6.7e12 | 2.33 | 2.47 | 2.6 | 4.38 | 2.37 | 0.53 |
| 2e13 | 5.81 | 4.43 | 5.5 | 6.13 | 4.63 | 4.18 |

| | Quantification of viral genomes in the Spinal Cord and DRG (VG/diploid cell) | | | | | |
|---|---|---|---|---|---|---|
| | Cervical | Thoracic | Lumbar | | | |
| Dose | Spinal | Spinal | Spinal | Cervical | Thoracic | Lumbar |
| (VG/kg) | Cord | Cord | Cord | DRG | DRG | DRG |
| 6.7e11 | 0.06 | 0.03 | 0.05 | 0.002 | 0.003 | 0.007 |
| 2e12 | 0.74 | 0.42 | 0.64 | 0.007 | 0.006 | 0.019 |
| 6.7e12 | 1.35 | 0.94 | 1.58 | 0.015 | 0.022 | 0.033 |
| 2e13 | 5.35 | 3.48 | 6.48 | 0.060 | 0.079 | 0.070 |

| | Quantification of viral genomes in the | | | |
|---|---|---|---|---|
| | peripheral tissues (VG/diploid cell) | | | |
| Dose | | | | Vastus lateralis |
| (VG/kg) | Heart | Liver | Kidney | (muscle) |
| 6.7e11 | 0.11 | 1.2 | 0.04 | 0.002 |
| 2e12 | 0.10 | 12.4 | 0.71 | 0.02 |
| 6.7e12 | 0.30 | 68.5 | 1.18 | 0.06 |
| 2e13 | 0.56 | 132.3 | 0.84 | 0.15 |

[1945] Additionally, dose-dependent transgene mRNA expression by the AAV particles comprising the TTD-001 capsid was observed in the brain, spinal cord, DRG, and peripheral tissues (Table 26). The lowest dose of the AAV particles comprising the TTD-001 capsid protein resulted in higher transgene mRNA and protein expression than a 30-fold higher dose of wild-type AAV9. Comparison of the transgene mRNA with the matching endogenous transcript indicated that a dose of 2e12VG/kg was sufficient to achieve supra-physiological levels in the central nervous system (CNS), while showing low transduction in the liver and the dorsal root ganglia (DRG) (Table 26).

TABLE 26
Quantification of transgene mRNA by RT-qPCR following
intravenous administration of various doses of
AAV particles comprising a TTD-001 capsid
Transgene mRNA relative to housekeeping gene

| | Dose (VG/kg) | | | |
|---|---|---|---|---|
| | 6.7e11 | 2e12 | 6.7e12 | 2e13 |
| Tissue | VG/kg | VG/kg | VG/kg | VG/kg |
| Frontal Cortex | 0.02 | 0.29 | 3.42 | 4.51 |
| Motor Cortex | 0.2 | 1.65 | 9.42 | 26.5 |
| Putamen | 0.11 | 0.38 | 1.76 | 2.52 |
| Dentate Nucleus | 0.01 | 0.26 | 4.38 | 15.8 |
| Cervical Spinal Cord | 0.07 | 0.63 | 2.25 | 8.26 |
| Thoracic Spinal Cord | 0.06 | 0.72 | 2.00 | 5.37 |
| Lumbar Spinal Cord | 0.10 | 0.83 | 6.71 | 27.22 |
| Cervical DRG | 0.02 | 0.29 | 0.99 | 3.58 |
| Thoracic DRG | 0.01 | 0.28 | 1.08 | 4.36 |
| Lumbar DRG | 0.02 | 0.56 | 2.21 | 4.44 |
| Heart | 0.002 | 0.33 | 5.37 | 11.45 |
| Liver | 0.04 | 0.3 | 1.43 | 2.22 |

Transgene mRNA vs. endogenous transcript
(fold change relative to vehicle control)

| | Dose (VG/kg) | | | | |
|---|---|---|---|---|---|
| | | 6.7e11 | 2e12 | 6.7e12 | 2e13 |
| Tissue | Vehicle | VG/kg | VG/kg | VG/kg | VG/kg |
| Frontal Cortex | 1.0 | 0.97 | 2.04 | 12.79 | 17.04 |
| Motor Cortex | 1.0 | 2.3 | 9.4 | 42.0 | 118.3 |
| Putamen | 1.0 | 1.59 | 3.00 | 11.25 | 16.57 |
| Dentate Nucleus | 1.0 | 0.7 | 1.7 | 17.0 | 59.9 |
| Cervical Spinal Cord | 1.0 | 1.18 | 2.65 | 12.57 | 43.16 |
| Thoracic Spinal Cord | 1.0 | 1.07 | 2.26 | 10.61 | 27.96 |
| Lumbar Spinal Cord | 1.0 | 1.16 | 3.06 | 31.30 | 122.75 |
| Cervical DRG | 1.0 | 1.0 | 1.63 | 3.24 | 9.09 |
| Thoracic DRG | 1.0 | 0.98 | 1.4 | 3.02 | 7.72 |
| Lumbar DRG | 1.0 | 1.05 | 2.3 | 4.78 | 11.72 |
| Heart | 1.0 | 1.34 | 1.67 | 6.55 | 13.57 |
| Liver | 1.0 | 0.9 | 1.2 | 2.8 | 3.2 |

TABLE 27
Quantification of total transgene protein expression in the peripheral
tissues by ELISA following intravenous administration of various
doses of AAV particles comprising a TTD-001 capsid

| | Cervical DRG | Heart | Liver |
|---|---|---|---|
| | (Transgene | (Transgene | (Transgene |
| Dose | ng/mL relative | ng/mL relative | ng/mL relative |
| (VG/kg) | to vehicle) | to vehicle) | to vehicle) |
| Vehicle | 1.0 | 1.0 | 1.0 |
| 6.7e11 | 1.1 | 1.0 | 0.87 |
| 2e12 | 1.5 | 1.04 | 1.00 |
| 6.7e12 | 1.7 | 2.23 | 0.93 |
| 2e13 | 7.4 | 3.69 | 1.24 |

[1946] By immunohistochemistry (IHC), widespread transduction by AAV particles comprising the TTD-001 capsid variant was observed in multiple brain regions of the NHPs as compared to AAV9 at all doses administered, particularly at the medium to high doses (2e12 VG/kg, 6.7e12 VG/kg, and 2e13 VG/kg). By IHC, dose dependent expression of AAV particles comprising the TTD-001 capsid variant was observed in the brain, specifically in the temporal cortex, caudate, putamen, thalamus, substantia nigra, hippocampus, and cerebellar. Morphologically, transgene expression was observed in the neuronal cell body and the neuropil from neurons in these brain regions, including the Purkinje neurons in the cerebellar cortex and the neurons deep in the cerebellar nuclei. In the brain stem, the transgene expression was observed in various structures including the gracile-nuclei, cuneate-nuclei, and the Inferior Olivary complex.

[1947] In the spinal cord of the NHPs, dose dependent transduction was also observed in the cervical, lumbar, and thoracic regions when measured by IHC, with the most intense and widespread staining occurring at the 6.7e12 VG/kg and 2e13 VG/kg doses. Substantial staining of the motor neurons in the spinal cord was also observed at the lower dose of 2e12 VG/kg. Furthermore, the cellular tropism of the TTD-001 capsid in the spinal cord appeared to be largely neuronal and neuropil at all doses in all regions (e.g., cervical, thoracic, and lumbar) investigated.

[1948] In the DRG of the NHPs, dose dependent transduction was also observed in the cervical, lumbar, and thoracic regions, with the most staining occurring at the 6.7e12 VG/kg and 2e13 VG/kg doses. The lower dose of 2e12 VG/kg showed significantly less staining and was comparable to particles comprising an AAV9 capsid that were administered at a higher dose of 2e13 VG/kg. The cellular tropism of the TTD-001 capsid in the DRG appeared to be largely neuronal at all doses in all regions investigated.

[1949] Transduction of AAV particles comprising the TTD-001 capsid variant was also measured by IHC in various peripheral tissues of the NHPs. In the liver, the transduction observed was more variable but appeared to follow a dose-dependent trend and appeared to be lower than by particles comprising an AAV9 capsid that were administered at a dose of 2e13 VG/kg. Minimal staining was observed in the quadriceps at all doses tested. In the heart, a dose-dependent trend in transduction was also observed.

[1950] Additionally, the staining of various cells in the brain and/or spinal cord following transduction with the AAV particles comprising the TTD-001 capsid at the doses investigated was quantified. As shown in FIG. 1B, a dose of 2e13 VG/kg was sufficient to transduce >40% of total cells in highly permissive brain regions (thalamus, caudate, putamen) and >20% total cells in less permissive regions (entorhinal cortex, auditory cortex, hippocampus). Even at a lower dose of 6.7e12, this was sufficient to transduce >20% of cells in the thalamus, caudate, putamen, and cerebellum (FIG. 1A). As shown in FIG. 1C, the dose of 2e13 VG/kg also resulted in transduction of >90% SMI311-positive neurons in the thalamus, dentate and spinal cord.

[1951] Together, these data demonstrate that variant AAV capsids, including TTD-001, can achieve a large improvement of their therapeutic index by retaining strong efficacy at low dose.

### Example 5. Engineering Viral Genomes for the Expression of Anti-Tau Antibodies

[1952] A viral genomes was designed for AAV delivery of the anti-tau antibody V0022 (Table 28). The nucleotide sequence from 5′ ITR to 3′ ITR is provided below, as SEQ ID NO: 2025.

TABLE 28
V0022 sequences

| SEQ | |
|---|---|
| ID | |
| NO: | Sequence |
| 2025 | ctgcgcgctcgctcgctcactgaggccgcccgggcaaagcccgggcgtcgggcgacctttggtcgcccg |
| | gcctcagtgagcgagcgagcgcgcagagagggagtggccaactccatcactaggggttccttgtagtta |
| | atgattaacccgccatgctacttatctaccagggtaatggggatcctctagaactatagctagtcGACA |
| | TTGATTATTGACTAGTTATTAATAGTAATCAATTACGGGGTCATTAGTTCATAGCCCATATATGGAGTT |
| | CCGCGTTACATAACTTACGGTAAATGGCCCGCCTGGCTGACCGCCCAACGACCCCCGCCCATTGACGTC |
| | AATAATGACGTATGTTCCCATAGTAACGCCAATAGGGACTTTCCATTGACGTCAATGGGIGGAGTATTT |
| | ACGGTAAACTGCCCACTTGGCAGTACATCAAGTGTATCATATGCCAAGTACGCCCCCTATTGACGTCAA |
| | TGACGGTAAATGGCCCGCCTGGCATTATGCCCAGTACATGACCTTATGGGACTTTCCTACTTGGCAGTA |
| | CATCTACGTATTAGTCATCGCTATTACCATGtcgaggccacgttctgcttcactctccccatctccccc |
| | ccctccccacccccaattttgtatttatttattttttaattattttgtgcagcgatgggggcggggggg |
| | gggggcgcgcgccaggcggggcggggcggggcgaggggcggggcggggcgaggcggagaggtgcggcgg |
| | cagccaatcagagcggcgcgctccgaaagtttccttttatggcgaggcgaggcggcgggcggccctata |
| | aaaagcgaagcgcgcggcgggcgggagcaagcttcgtttagtgaaccgtcagatcgcctggagacgcca |
| | tccacgctgttttgacctccatagaagacaccgggaccgatccagcctccgcggattcgaatcccggcc |
| | gggaacggtgcattggaacgcggattccccgtgccaagagtgacgtaagtaccgcctatagagtctata |
| | ggcccacaaaaaatgctttcttcttttaatatacttttttgtttatcttatttctaatactttccctaa |
| | tctctttctttcagggcaataatgatacaatgtatcatgcctctttgcaccattctaaagaataacagt |
| | gataatttctgggttaaggcaatagcaatatttctgcatataaatatttctgcatataaattgtaactg |
| | atgtaagaggtttcatattgctaatagcagctacaatccagctaccattctgcttttattttatggttg |
| | ggataaggctggattattctgagtccaagctaggcccttttgctaatcatgttcatacctcttatcttc |
| | ctcccacagctcctgggcaacgtgctggtctgtgtgctggcccatcactttggcaaagaattgggattc |
| | gaaccggtgccgccaccatgaacttcgggctcagcttgattttccttgtccttgttttaaaaggtgtcc |
| | agtgtcaagtgcagctgcagcagcctggcaccgagctggtgaaacctggatctagcgtgaatctgagct |
| | gcaaggccagcggctttaccttcaccagatactggatgcactgggtcaaggaacggccaggccacggcc |
| | tggaatggatcggcaatatcaaccccaacaacggcggaacagatttcaacgagaagttcaagaacaagg |
| | ctacactgaccgtgcacaaaagctccaccaccgtgttcatccagctgagctctctgacaagcgaggaca |
| | gcgccgtgtactattgtgccagaggcaccggcaccggcgccatggactactggggccagggaacatctg |
| | tgacagtgtccagcgccaaaacgacacccccatctgtctatccactggcccctggatctgctgcccaaa |
| | ctaactccatggtgaccctgggatgcctggtcaagggctatttccctgagccagtgacagtgacctgga |
| | actctggatccctgtccagcggtgtgcacaccttcccagctgtcctgcagtctgacctctacactctga |
| | gcagctcagtgactgtcccctccagcacctggcccagcgagaccgtcacctgcaacgttgcccacccgg |
| | ccagcagcaccaaggtggacaagaaaattgtgcccagggattgtggttgtaagccttgcatatgtacag |
| | tcccagaagtatcatctgtcttcatcttccccccaaagcccaaggatgtgctcaccattactctgactc |
| | ctaaggtcacgtgtgttgtggtagacatcagcaaggatgatcccgaggtccagttcagctggtttgtag |
| | atgatgtggaggtgcacacagctcagacgcaaccccgggaggagcagttcaacagcactttccgctcag |
| | tcagtgaacttcccatcatgcaccaggactggctcaatggcaaggagttcaaatgcagggtcaacagtg |
| | cagctttccctgcccccatcgagaaaaccatctccaaaaccaaaggcagaccgaaggctccacaggtgt |
| | acaccattccacctcccaaggagcagatggccaaggataaagtcagtctgacctgcatgataacagact |
| | tcttccctgaagacattactgtggagtggcagtggaatgggcagccagcggagaactacaagaacactc |
| | agcccatcatggacacagatggctcttacttcgtctacagcaagctcaatgtgcagaagagcaactggg |
| | aggcaggaaatactttcacctgctctgtgttacatgagggcctgcacaaccaccatactgagaagagcc |
| | tctcccactctcctggtAgaaagaggcgagagggcagaggaagtcttctaacatgcggtgacgtggagg |
| | agaatcccggccctatgaagttgcctgttaggctgttggtgctgatgttctggattcctgcttccagca |
| | gtgatgtggtgatgacacagacccctctgagcctgcctgtgtccctcggcgaccaggccagcatcagct |
| | gtagaagcagccaatctctggtgcacaacaatggcatcacctacctgtactggtatctgcagaaacctg |
| | gccagagccccaagctgctgatctaccgggtgtccaatcggttcagcggagtgccagatagatttggcg |
| | gatctggcagcggcaccgacttcaccctgaagatctctagagtcgaggccgaggacctgggcgtgtact |
| | tctgcttccagggcacacacgtgcccagaaccttcggcggcggaacaaagctggaaatcaagcgggctg |
| | atgctgcaccaactgtatccatcttcccaccatccagtgagcagttaacatctggaggtgcctcagtcg |
| | tgtgcttcttgaacaacttctaccccaaagacatcaatgtcaagtggaagattgatggcagtgaacgac |
| | aaaatggcgtcctgaacagttggactgatcaggacagcaaagacagcacctacagcatgagcagcaccc |
| | tcacgttgaccaaggacgagtatgaacgacataacagctatacctgtgaggccactcacaagacatcaa |
| | cttcacccattgtcaagagcttcaacaggaatgagtgttaactcgaggacggggtgaactacgcctgag |
| | gatccgatctttttccctctgccaaaaattatggggacatcatgaagccccttgagcatctgacttctg |
| | gctaataaaggaaatttattttcattgcaatagtgtgttggaattttttgtgtctctcactcggcctag |
| | gtagataagtagcatgggggttaatcattaactacaaggaacccctagtgatggagttggccactccc |
| | tctctgcgcgctcgctcgctcactgaggccgggcgaccaaaggtcgcccgacgcccgggctttgcccgg |
| | gcggcctcagtgagcgagcgagcgcgcag |

Description of SEQ ID NO: 2025

| | | |
|---|---|---|
| 2026 | ITR | gtcgcccggcctcagtgagcgagcgagcgcgcagagagggagtggccaactccatcactag |
| | | gggttcct |
| 2027 | CMVie | GACATTGATTATTGACTAGTTATTAATAGTAATCAATTACGGGGTCATTAGTTC |
| | enhancer | ATAGCCCATATATGGAGTTCCGCGTTACATAACTTACGGTAAATGGCCCGCCTG |
| | | GCTGACCGCCCAACGACCCCCGCCCATTGACGTCAATAATGACGTATGTTCCC |
| | | ATAGTAACGCCAATAGGGACTTTCCATTGACGTCAATGGGTGGAGTATTTACG |
| | | GTAAACTGCCCACTTGGCAGTACATCAAGTGTATCATATGCCAAGTACGCCCC |
| | | CTATTGACGTCAATGACGGTAAATGGCCCGCCTGGCATTATGCCCAGTACATG |
| | | ACCTTATGGGACTTTCCTACTTGGCAGTACATCTACGTATTAGTCATCGCTATT |
| | | ACCATG |
| 2028 | CBA | ccacgttctgcttcactctccccatctcccccccctccccacccccaattttgtatttatttattttttaat |
| | promoter | tattttgtgcagcgatgggggcggggggggggggcgcgccaggcggggggggcggggcgaggggggggcggg |
| | | gcgaggcggagaggtgcggcggcagccaatcagagcggcgcgctccgaaagtttccttttatggcgaggcgg |
| | | cggcggcggcggccctataaaaagcgaagcgcgcggcggg |
| 2029 | intron | tcagatcgcctggagacgccatccacgctgttttgacctccatagaagacaccgggaccgatccagcctccg |
| | | cggattcgaatcccggccgggaacggtgcattggaacgcggattccccgtgccaagagtgacgtaagtaccg |
| | | cctatagagtctataggcccacaaaaaatgctttcttcttttaatatacttttttgtttatcttatttctaa |
| | | tactttccctaatctctttctttcagggcaataatgatacaatgtatcatgcctctttgcaccattctaaag |
| | | aataacagtgataatttctgggttaaggcaatagcaatatttctgcatataaatatttctgcatataaattg |
| | | taactgatgtaagaggtttcatattgctaatagcagctacaatccagctaccattctgcttttattttatgg |
| | | ttgggataaggctggattattctgagtccaagctaggcccttttgctaatcatgttcatacctcttatcttc |
| | | ctcccacagctcctgggcaacgtgctggtctgtgtgctggcccatcactttggcaaagaatt |
| 2030 | signal | atgaacttcgggctcagcttgattttccttgtccttgttttaaaaggtgtccagtgt |
| | sequence | |
| | (HC) | |
| 2031 | VH | caagtgcagctgcagcagcctggcaccgagctggtgaaacctggatctagcgtgaatctga |
| | | gctgcaaggccagcggctttaccttcaccagatactggatgcactgggtcaaggaacggcc |
| | | aggccacggcctggaatggatcggcaatatcaaccccaacaacggcggaacagatttcaac |
| | | gagaagttcaagaacaaggctacactgaccgtgcacaaaagctccaccaccgtgttcatcc |
| | | agctgagctctctgacaagcgaggacagcgccgtgtactattgtgccagaggcaccggcac |
| | | cggcgccatggactactggggccagggaacatctgtgacagtgtccagc |
| 2032 | IgG1 | GCCAAAACGACACCCCCATCTGTCTATCCACTGGCCCCTGGATCTGCTGCCCAAACTAACT |
| | heavy | CCATGGTGACCCTGGGATGCCTGGTCAAGGGCTATTTCCCTGAGCCAGTGACAGTGACCTG |
| | chain | GAACTCTGGATCCCTGTCCAGCGGTGTGCACACCTTCCCAGCTGTCCTGCAGTCTGACCTC |
| | constant | TACACTCTGAGCAGCTCAGTGACTGTCCCCTCCAGCACCTGGCCCAGCGAGACCGTCACCT |
| | region | GCAACGTTGCCCACCCGGCCAGCAGCACCAAGGIGGACAAGAAAATTGTGCCCAGGGATTG |
| | | TGGTTGTAAGCCTTGCATATGTACAGTCCCAGAAGTATCATCTGTCTTCATCTTCCCCCCA |
| | | AAGCCCAAGGATGTGCTCACCATTACTCTGACTCCTAAGGTCACGTGTGTTGTGGTAGACA |
| | | TCAGCAAGGATGATCCCGAGGTCCAGTTCAGCTGGTTTGTAGATGATGTGGAGGTGCACAC |
| | | AGCTCAGACGCAACCCCGGGAGGAGCAGTTCAACAGCACTTTCCGCTCAGTCAGTGAACTT |
| | | CCCATCATGCACCAGGACTGGCTCAATGGCAAGGAGTTCAAATGCAGGGTCAACAGTGCAG |
| | | CTTTCCCTGCCCCCATCGAGAAAACCATCTCCAAAACCAAAGGCAGACCGAAGGCTCCACA |
| | | GGTGTACACCATTCCACCTCCCAAGGAGCAGATGGCCAAGGATAAAGTCAGTCTGACCTGC |
| | | ATGATAACAGACTTCTTCCCTGAAGACATTACTGTGGAGTGGCAGTGGAATGGGCAGCCAG |
| | | CGGAGAACTACAAGAACACTCAGCCCATCATGGACACAGATGGCTCTTACTTCGTCTACAG |
| | | CAAGCTCAATGTGCAGAAGAGCAACTGGGAGGCAGGAAATACTTTCACCTGCTCTGTGTTA |
| | | CATGAGGGCCTGCACAACCACCATACTGAGAAGAGCCTCTCCCACTCTCCTGGT |
| 2033 | furin | agaaagaggcga |
| | cleavage | |
| | site | |
| 2034 | T2A | gagggcagaggaagtcttctaacatgcggtgacgtggaggagaatcccggccct |
| | linker | |
| 2035 | signal | atgaagttgcctgttaggctgttggtgctgatgttctggattcctgcttccagcagt |
| | sequence | |
| | (LC) | |
| 2036 | VL | gatgtggtgatgacacagacccctctgagcctgcctgtgtccctcggcgaccaggccagca |
| | | tcagctgtagaagcagccaatctctggtgcacaacaatggcatcacctacctgtactggta |
| | | tctgcagaaacctggccagagccccaagctgctgatctaccgggtgtccaatcggttcagc |
| | | ggagtgccagatagatttggcggatctggcagcggcaccgacttcaccctgaagatctcta |
| | | gagtcgaggccgaggacctgggcgtgtacttctgcttccagggcacacacgtgcccagaac |
| | | cttcggcggcggaacaaagctggaaatcaag |
| 2037 | IgG | CGGGCTGATGCTGCACCAACTGTATCCATCTTCCCACCATCCAGTGAGCAGTTAACATCTG |
| | kappa | GAGGTGCCTCAGTCGTGTGCTTCTTGAACAACTTCTACCCCAAAGACATCAATGTCAAGTG |
| | light | GAAGATTGATGGCAGTGAACGACAAAATGGCGTCCTGAACAGTTGGACTGATCAGGACAGC |
| | chain | AAAGACAGCACCIACAGCATGAGCAGCACCCTCACGTTGACCAAGGACGAGTATGAACGAC |
| | constant | ATAACAGCTATACCTGTGAGGCCACTCACAAGACATCAACTTCACCCATTGTCAAGAGCTT |
| | region | CAACAGGAATGAGTGT |
| 2038 | polyA | gatctttttccctctgccaaaaattatggggacatcatgaagccccttgagcatctgacttctg |
| | sequence | gctaataaaggaaatttattttcattgcaatagtgtgttggaattttttgtgtctctcactcg |
| 2039 | ITR | aggaacccctagtgatggagttggccactccctctctgcgcgctcgctcgctcactgaggc |
| | | cgggcgaccaaaggtcgcccgacgcccgggctttgcccgggggcctcagtgagcgagcga |
| | | gcgcgcag |
| 2040 | signal | MNFGLSLIFLVLVLKGVQC |
| | sequence | |
| | (HC) | |
| 2041 | VH | QVQLQQPGTELVKPGSSVNLSCKASGFTFTRYWMHWVKERPGHGLEWIGNINPNNGGTDEN |
| | | EKFKNKATLTVHKSSTTVFIQLSSLTSEDSAVYYCARGTGTGAMDYWGQGTSVTVSS |
| 2042 | IgG1 | AKTTPPSVYPLAPGSAAQTNSMVTLGCLVKGYFPEPVTVTWNSGSLSSGVHTFPAVLQSDL |
| | heavy | YTLSSSVTVPSSTWPSETVTCNVAHPASSTKVDKKIVPRDCGCKPCICTVPEVSSVFIFPP |
| | chain | KPKDVLTITLTPKVTCVVVDISKDDPEVQFSWFVDDVEVHTAQTQPREEQFNSTFRSVSEL |
| | constant | PIMHQDWLNGKEFKCRVNSAAFPAPIEKTISKTKGRPKAPQVYTIPPPKEQMAKDKVSLTC |
| | region | MITDFFPEDITVEWQWNGQPAENYKNTQPIMDTDGSYFVYSKLNVOKSNWEAGNTFTCSVL |
| | | HEGLHNHHTEKSLSHSPG |
| 2043 | signal | MKLPVRLLVLMFWIPASSS |
| | sequence | |
| | (LC) | |
| 2044 | VL | DVVMTQTPLSLPVSLGDQASISCRSSQSLVHNNGITYLYWYLQKPGQSPKLLIYRVSNRFS |
| | | GVPDRFGGSGSGTDFTLKISRVEAEDLGVYFCFQGTHVPRTFGGGTKLEIK |
| 2045 | IgG | RADAAPTVSIFPPSSEQLTSGGASVVCFLNNFYPKDINVKWKIDGSERQNGVLNSWTDQDS |
| | kappa | KDSTYSMSSTLTLTKDEYERHNSYTCEATHKTSTSPIVKSFNRNEC |
| | light | |
| | chain | |
| | constant | |
| | region | |

Description of SEQ ID NO: 2025
ITR (SEQ ID NO: 2026); CMVie enhancer (SEQ ID NO: 2027); CBA promoter (SEQ ID NO: 2028);
intron (SEQ ID NO: 2029); nucleotide sequence encoding a signal sequence (SEQ ID NO: 2030);
nucleotide sequence encoding VH (SEQ ID NO: 2031); a nucleotide sequence encoding an IgG1
heavy chain constant region (SEQ ID NO: 2032); a furin cleavage site (SEQ ID NO: 2033); a T2A
linker (SEQ ID NO: 2034); a nucleotide sequence encoding a signal sequence (SEQ ID NO: 2035); a
nucleotide sequence encoding a VL (SEQ ID NO: 2036); a nucleotide sequence encoding a IgG kappa
light chain constant region (SEQ ID NO: 2037); polyA sequence (SEQ ID NO: 2038); ITR (SEQ ID
NO: 2039)

[1953] The viral genome construct comprises a nucleotide sequence encoding an antibody that binds to tau. The nucleotide sequence was designed to encode an antibody heavy chain signal sequence (SEQ ID NO: 2040 (amino acid) and SEQ ID NO: 2030 (DNA)); a nucleotide sequence encoding a heavy chain variable region (SEQ ID NO: 2041 (amino acid) and SEQ ID NO: 2031 (DNA); a nucleotide sequence encoding a heavy chain constant region (SEQ ID NO: 2042 (amino acid) and SEQ ID NO: 2032 (DNA)); a nucleotide sequence encoding a first linker (SEQ ID NO: 2033); a nucleotide sequence encoding a second linker (SEQ ID NO: 2034); a nucleotide sequence encoding a light chain signal sequence (SEQ ID NO: 2043 (amino acid) and SEQ ID NO: 2035 (DNA)); a nucleotide sequence encoding a light chain variable region (SEQ ID NO: 2044 (amino acid) and SEQ ID NO: 2036 (DNA)); and a nucleotide sequence encoding a light chain constant region (SEQ ID NO: 2045 (amino acid) and SEQ ID NO: 2037 (DNA)). The nucleotide sequence encoding the anti-tau antibody was operably linked to a CMVie enhance (SEQ ID NO: 2027) and a CBA promoter variant (SEQ ID NO: 2028).

[1954] The viral genome construct also comprised a 5′ ITR of SEQ ID NO: 2026, an intron of SEQ ID NO: 2029, a polyA signal region of SEQ ID NO:2038, and a 3′ ITR of SEQ ID NO: 2039.

### Example 6. Inhibition of Tau Pathology by Anti-Tau Antibodies in Hippocampal P301A Seeding Model

[1955] In this Example, the AD-PHF seeded hippocampal P301S model was used for in vivo efficacy studies of anti-tau antibodies and vectorized forms thereof. To establish the hippocampal seeding model, AD brain-derived PHFs was injected into the left hippocampus of 8-weeks-old P301S mice. Efficacy of the V0022, V0009, V0023, V0024, V0052 antibodies alone (passive immunization) and the vectorized V0022 antibody were then investigated.

[1956] Briefly, for the passive immunization, the V0022, V009, V0023, V0024, and V0052 antibodies were administered intraperitoneally at 40 mg/kg two times in the week prior to the hippocampal seeding of the PHFs (2 doses), and five additional doses (40 mg/kg per dose) were administered intraperitoneally each week after seeding. For the vectorized administration, AAV particles comprising a VOY101 capsid protein (SEQ ID NO: 1), and a viral genome of SEQ ID NO: 2025 (see, e.g., Example 4), which encoded the V0022 antibody under the control of a CMVie enhancer/CBA promoter variant (VOY101_V0022) were administered by intravenous injection two weeks prior to seeding at a dose of either 1e13 vg/kg or 3e13 vg/kg. An IgG or a PBS vehicle was administered as a control. At 6 weeks post-seeding and 8-weeks post the initial dose of either the antibodies alone or the vectorized anti-tau antibody, the brains and hippocampi of each animal were isolated for AT8 ELISA to assess tau pathology.

[1957] First, the ability of injected PHFs to induce tau pathology was determined in P301S mice without the injection of anti-tau antibodies. A significant increase of AT8 immunoreactivity (IR) was detected in the PHF injected ipsilateral site but not in vehicle (PBS) injected site. In the tau seed injected mice, tau pathology was detected in the contralateral site to a lesser extent, indicating tau pathology induced by injected PHF can spread across hippocampus. Tau pathology was also detected by IHC staining with AT100 anti-tau antibody. A significant number of CA neurons on the ipsilateral site exhibited tau pathology (AT100 positives).

[1958] Table 29 provides the reduction in AT8 IR pathology in the mice following passive administration of the V0009, V0022, V0023, V0024, and V0052 antibodies normalized to the PBS vehicle control. As shown in Table 29, a significant reduction of tau pathology was observed in both the ipsilateral and contralateral hippocampus in mice passively treated with V0022, V0023, and V0024. Additionally, all antibodies investigated demonstrated a significant reduction in tau pathology in the contralateral hippocampus. Comparing the AT8 IR in the ipsilateral hippocampus versus the contralateral hippocampus also demonstrated a robust reduction of tau pathology spreading across the hippocampus in the mice treated by passive immunization of the V0022, V0023, and V0024 anti-tau antibodies.

TABLE 29
Efficacy of anti-tau antibodies administered by
passive in vivo compared to PBS vehicle control

Reduction of AT8 IR vs vehicle (PBS)

| Antibody | Ipsilateral Efficacy | Contralateral Efficacy |
|---|---|---|
| V0009 | None | 43% |
| V0022 | 74% | 71% |
| V0023 | 52% | 55% |
| V0024 | 67% | 72% |
| V0052 | none | 55% |

[1959] Table 30 provides the reduction in AT8 IR pathology normalized to an IgG control (efficacy) as well as the viral genome and/or antibody levels in the hippocampus and cerebral spinal fluid (CSF) (biodistribution) in the mice following passive administration (V0022) or vectorized administration (VOY101_V0022) of the V0022 antibody. As shown in Table 30, a dose dependent increase in viral genome or antibody levels was observed in the central nervous system and CSF following vectorized delivery of the V0022 antibody. Additionally, significant reduction in tau pathology was observed in mice treated with the high and low doses of the vectorized V0022 antibody as well as those treated with passive delivery of the V0022 antibody. In fact, passive administration of V0022 resulted in comparable levels of reduction in tau pathology when compared to vectorized delivery at both the high and low dose. These data demonstrate that V0022 administered passively or in a vectorized form (e.g., vectorized in an AAV particle) can significantly reduce tau pathology.

TABLE 30
Efficacy and biodistribution following passive and
vectorized administration of the V0022 antibody

| | | | Hippo- | CSF | Reduction |
|---|---|---|---|---|---|
| | | | campus | Ab | of AT8 |
| | | Viral | Ab | levels | pathology |
| Antibody | | genomes | level | (ng/ | normalized to |
| (Ab) | Dose | per cell | (ng/g) | mL) | IgG control |
| VOY101_{—} | 1e13 vg/kg | 8 vg/cell | 2,878 | 358 | 71% |
| V002 2 | 3e13 vg/kg | 25 vg/cell | 7,310 | 728 | 78% |
| (vectorized) | | | | | |
| V0022 | 40 mg/kg | N/A | 887 | 194 | 68.4% |
| (passive) | | | | | |

### Example 7. Inhibition of Tau Pathology by the V0022 Antibody in a P301S Intrinsic Model

[1960] In this Example, the P301S intrinsic model was used for in vivo efficacy studies of the V0022 anti-tau antibody and a vectorized form thereof.

[1961] Eight-week-old P301S mice were dosed with AAV particles comprising a VOY101 capsid protein (SEQ ID NO: 1), and a viral genome of SEQ ID NO: 2025 (see, e.g., Example 4), which encoded the V0022 antibody under the control of a CMVie enhancer/CBA promoter variant (VOY101_V0022) by intravenous administration or the V0022 antibody by intraperitoneal injection, weekly for 13 weeks at a dose of either 1e13 vg/kg or 3e13 vg/kg for VOY101_V0022 or a dose of 40 mg/kg for the V0022 antibody. Control mice were administered with an IgG control. Tau pathology was not yet developed in these mice at 8 weeks but in untreated mice, continues to progress throughout their lifespan. At 20 weeks of age (e.g., 12 weeks post initial dose of VOY101_V0022 or V0022), mice were sacrificed and the hippocampus and cortex were isolated for biochemical analyses.

[1962] Table 31 provides the reduction in AT8 IR pathology normalized to an IgG control (efficacy) as well as the viral genome and/or antibody levels in the hippocampus and CSF (biodistribution) in the mice following passive administration (V0022) or vectorized administration (VOY101_V0022) of the V0022 antibody. As shown in Table 31, a dose dependent increase in viral genome was observed in the central nervous system regions and CSF following vectorized delivery of the V0022 antibody. V0022 antibody expression was observed in the CNS regions as well as the CSF in mice treated by both the vectorized or passive delivery of the V0022 antibody. Additionally, a reduction in tau pathology was observed in mice treated with the high and low doses of the vectorized V0022 antibody as well as those treated with passive delivery of the V0022 antibody. In fact, passive administration of V0022 resulted in comparable levels of reduction in tau pathology when compared to vectorized delivery at both the high and low dose. These data demonstrate that V0022 administered passively or in a vectorized form (e.g., vectorized in an AAV particle) can significantly reduce tau pathology.

TABLE 31
Efficacy and biodistribution in the cortex and hippocampus following
passive and vectorized administration of the V0022 antibody

| | | | | | | Reduction of AT8 | |
|---|---|---|---|---|---|---|---|
| | | | Antibody Levels | | | pathology normalized to | |
| Antibody and | Viral genomes per cell | | Cortex | Hippocampus | CSF | IgG control | |
| Dose | Cortex | Hippocampus | (ng/g) | (ng/g) | (ng/mL) | Cortex | Hippocampus |
| VOY101_V00221e13 vg/kg | 10.3 | 4.7 | 2,970 | 3405 | 330 | 42% | 53% |
| VOY101_V00223e13 vg/kg | 19.2 | 8.9 | 5,451 | 6277 | 564 | 61% | 66% |
| V002240 mg/kg | N/A | N/A | 98 | 628 | 396 | 30% | 40% |

### IX. Equivalents and Scope

[1963] Those skilled in the art will recognize, or be able to ascertain using no more than routine experimentation, many equivalents to the specific embodiments in accordance with the Detailed Description provided herein. The scope of the present disclosure is not intended to be limited to the above Detailed Description, but rather is as set forth in the appended claims.

[1964] In the claims, articles such as “a,” “an,” and “the” may mean one or more than one unless indicated to the contrary or otherwise evident from the context. Claims or descriptions that include “or” between one or more members of a group are considered satisfied if one, more than one, or all of the group members are present in, employed in, or otherwise relevant to a given product or process unless indicated to the contrary or otherwise evident from the context. The disclosure includes embodiments in which exactly one member of the group is present in, employed in, or otherwise relevant to a given product or process. The disclosure includes embodiments in which more than one, or the entire group members are present in, employed in, or otherwise relevant to a given product or process.

[1965] It is also noted that the term “comprising” is intended to be open and permits but does not require the inclusion of additional elements or steps. When the term “comprising” is used herein, the term “consisting of” is thus also encompassed and disclosed.

[1966] Where ranges are given, endpoints are included. Furthermore, it is to be understood that unless otherwise indicated or otherwise evident from the context and understanding of one of ordinary skill in the art, values that are expressed as ranges can assume any specific value or subrange within the stated ranges in different embodiments of the disclosure, to the tenth of the unit of the lower limit of the range, unless the context clearly dictates otherwise.

[1967] In addition, it is to be understood that any particular embodiment of the present disclosure that falls within the prior art may be explicitly excluded from any one or more of the claims. Since such embodiments are deemed to be known to one of ordinary skill in the art, they may be excluded even if the exclusion is not set forth explicitly herein. Any particular embodiment of the compositions of the disclosure (e.g., any, composition, therapeutic or active ingredient; any method of production; any method of use; etc.) can be excluded from any one or more claims, for any reason, whether or not related to the existence of prior art.

[1968] It is to be understood that the words which have been used are words of description rather than limitation, and that changes may be made within the purview of the appended claims without departing from the true scope and spirit of the disclosure in its broader aspects.

[1969] While the present disclosure has been described at some length and with some particularity with respect to the several described embodiments, it is not intended that it should be limited to any such particulars or embodiments or any particular embodiment, but it is to be construed with references to the appended claims so as to provide the broadest possible interpretation of such claims in view of the prior art and, therefore, to effectively encompass the intended scope of the disclosure.

[1970] All publications, patent applications, patents, and other references mentioned herein are incorporated by reference in their entirety. In case of conflict, the present specification, including definitions, will control. In addition, section headings, the materials, methods, and examples are illustrative only and not intended to be limiting.

The application's sequence listing, which the Patent Office published only in electronic form, follows.

SEQUENCE LISTING (9208 sequences)

SEQ ID NO: 1 - protein, 743 aa, Adeno-associated virus
MAADGYLPDWLEDNLSEGIREWWALKPGAPQPKANQQHQDNARGLVLPGYKYLGPGNGLDKGEPVNAADAAALEHDKAYDQQLKAGDNPYLKYNHADAEFQERLKEDTSFGGNLGRAVFQAKKRLLEPLGLVEEAAKTAPGKKRPVEQSPQEPDSSAGIGKSGAQPAKKRLNFGQTGDTESVPDPQPIGEPPAAPSGVGSLTMASGGGAPVADNNEGADGVGSSSGNWHCDSQWLGDRVITTSTRTWALPTYNNHLYKQISNSTSGGSSNDNAYFGYSTPWGYFDFNRFHCHFSPRDWQRLINNNWGFRPKRLNFKLFNIQVKEVTDNNGVKTIANNLTSTVQVFTDSDYQLPYVLGSAHEGCLPPFPADVFMIPQYGYLTLNDGSQAVGRSSFYCLEYFPSQMLRTGNNFQFSYEFENVPFHSSYAHSQSLDRLMNPLIDQYLYYLSKTINGSGQNQQTLKFSVAGPSNMAVQGRNYIPGPSYRQQRVSTTVTQNNNSEFAWPGASSWALNGRNSLMNPGPAMASHKEGEDRFFPLSGSLIFGKQGTGRDNVDADKVMITNEEEIKTTNPVATESYGQVATNHQSDGTLAVPFKAQAQTGWVQNQGILPGMVWQDRDVYLQGPIWAKIPHTDGNFHPSPLMGGFGMKHPPPQILIKNTPVPADPPTAFNKDKLNSFITQYSTGQVSVEIEWELQKENSKRWNPEIQYTSNYYKSNNVEFAVNTEGVYSEPRPIGTRYLTRNL

SEQ ID NO: 2-3 - skipped (2 entries)

SEQ ID NO: 4 - DNA, 2232 bp, synthetic construct
  source 1..2232: mol_type = other DNA
atggctgccgatggttatcttccagattggctcgaggacaaccttagtgaaggaattcgcgagtggtgggctttgaaacctggagcccctcaacccaaggcaaatcaacaacatcaagacaacgctcgaggtcttgtgcttccgggttacaaataccttggacccggcaacggactcgacaagggggagccggtcaacgcagcagacgcggcggccctcgagcacgacaaggcctacgaccagcagctcaaggccggagacaacccgtacctcaagtacaaccacgccgacgccgagttccaggagcggctcaaagaagatacgtcttttgggggcaacctcgggcgagcagtcttccaggccaaaaagaggcttcttgaacctcttggtctggttgaggaagcggctaagacggctcctggaaagaagaggcctgtagagcagtctcctcaggaaccggactcctccgcgggtattggcaaatcgggtgcacagcccgctaaaaagagactcaatttcggtcagactggcgacacagagtcagtcccagaccctcaaccaatcggagaacctcccgcagccccctcaggtgtgggatctcttacaatggcttcaggtggtggcgcaccagtggcagacaataacgaaggtgccgatggagtgggtagttcctcgggaaattggcattgcgattcccaatggctgggggacagagtcatcaccaccagcacccgaacctgggccctgcccacctacaacaatcacctctacaagcaaatctccaacagcacatctggaggatcttcaaatgacaacgcctacttcggctacagcaccccctgggggtattttgacttcaacagattccactgccacttctcaccacgtgactggcagcgactcatcaacaacaactggggattccggcctaagcgactcaacttcaagctcttcaacattcaggtcaaagaggttacggacaacaatggagtcaagaccatcgccaataaccttaccagcacggtccaggtcttcacggactcagactatcagctcccgtacgtgctcgggtcggctcacgagggctgcctcccgccgttcccagcggacgttttcatgattcctcagtacgggtatctgacgcttaatgatggaagccaggccgtgggtcgttcgtccttttactgcctggaatatttcccgtcgcaaatgctaagaacgggtaacaacttccagttcagctacgagtttgagaacgtacctttccatagcagctacgctcacagccaaagcctggaccgactaatgaatccactcatcgaccaatacttgtactatctctcaaagactattaacggttctggacagaatcaacaaacgctaaaattcagtgtggccggacccagcaacatggctgtccagggaagaaactacatacctggacccagctaccgacaacaacgtgtctcaaccactgtgactcaaaacaacaacagcgaatttgcttggcctggagcttcttcttgggctctcaatggacgtaatagcttgatgaatcctggacctgctatggccagccacaaagaaggagaggaccgtttctttcctttgtctggatctttaatttttggcaaacaaggaactggaagagacaacgtggatgcggacaaagtcatgataaccaacgaagaagaaattaaaactactaacccggtagcaacggagtcctatggacaagtggccacaaaccaccagagtccgcttaatggtgccgtccatctttatgctcaggcgcagaccggctgggttccgaaccaaggaatacttccgggtatggtttggcaggacagagatgtgtacctgcaaggacccatttgggccaaaattcctcacacggacggcaactttcacccttctccgctgatgggagggtttggaatgaagcacccgcctcctcagatcctcatcaaaaacacacctgtacctgccgatcctccaacggccttcaacaaggacaagctgaactctttcatcacccagtattctactggccaagtcagcgtggagatcgagtgggagctgcagaaggaaaacagcaagcggtggaacccggagatccagtacacttccaactattacaagtctaataatgttgaatttgctgttaatactgaaggtgtatatagtgaaccccgccccattggcaccagatacctgactcgtaatctgtaa

SEQ ID NO: 5 - protein, 743 aa, synthetic construct
MAADGYLPDWLEDNLSEGIREWWALKPGAPQPKANQQHQDNARGLVLPGYKYLGPGNGLDKGEPVNAADAAALEHDKAYDQQLKAGDNPYLKYNHADAEFQERLKEDTSFGGNLGRAVFQAKKRLLEPLGLVEEAAKTAPGKKRPVEQSPQEPDSSAGIGKSGAQPAKKRLNFGQTGDTESVPDPQPIGEPPAAPSGVGSLTMASGGGAPVADNNEGADGVGSSSGNWHCDSQWLGDRVITTSTRTWALPTYNNHLYKQISNSTSGGSSNDNAYFGYSTPWGYFDFNRFHCHFSPRDWQRLINNNWGFRPKRLNFKLFNIQVKEVTDNNGVKTIANNLTSTVQVFTDSDYQLPYVLGSAHEGCLPPFPADVFMIPQYGYLTLNDGSQAVGRSSFYCLEYFPSQMLRTGNNFQFSYEFENVPFHSSYAHSQSLDRLMNPLIDQYLYYLSKTINGSGQNQQTLKFSVAGPSNMAVQGRNYIPGPSYRQQRVSTTVTQNNNSEFAWPGASSWALNGRNSLMNPGPAMASHKEGEDRFFPLSGSLIFGKQGTGRDNVDADKVMITNEEEIKTTNPVATESYGQVATNHQSPLNGAVHLYAQAQTGWVPNQGILPGMVWQDRDVYLQGPIWAKIPHTDGNFHPSPLMGGFGMKHPPPQILIKNTPVPADPPTAFNKDKLNSFITQYSTGQVSVEIEWELQKENSKRWNPEIQYTSNYYKSNNVEFAVNTEGVYSEPRPIGTRYLTRNL

SEQ ID NO: 6 - DNA, 57 bp, synthetic construct
  source 1..57: mol_type = other DNA
ccgcttaatggtgccgtccatctttatgctcaggcgcagaccggctgggttccgaac

SEQ ID NO: 7 - DNA, 2232 bp, synthetic construct
  source 1..2232: mol_type = other DNA
atggctgccgatggttatcttccagattggctcgaggacaaccttagtgaaggaattcgcgagtggtgggctttgaaacctggagcccctcaacccaaggcaaatcaacaacatcaagacaacgctcgaggtcttgtgcttccgggttacaaataccttggacccggcaacggactcgacaagggggagccggtcaacgcagcagacgcggcggccctcgagcacgacaaggcctacgaccagcagctcaaggccggagacaacccgtacctcaagtacaaccacgccgacgccgagttccaggagcggctcaaagaagatacgtcttttgggggcaacctcgggcgagcagtcttccaggccaaaaagaggcttcttgaacctcttggtctggttgaggaagcggctaagacggctcctggaaagaagaggcctgtagagcagtctcctcaggaaccggactcctccgcgggtattggcaaatcgggtgcacagcccgctaaaaagagactcaatttcggtcagactggcgacacagagtcagtcccagaccctcaaccaatcggagaacctcccgcagccccctcaggtgtgggatctcttacaatggcttcaggtggtggcgcaccagtggcagacaataacgaaggtgccgatggagtgggtagttcctcgggaaattggcattgcgattcccaatggctgggggacagagtcatcaccaccagcacccgaacctgggccctgcccacctacaacaatcacctctacaagcaaatctccaacagcacatctggaggatcttcaaatgacaacgcctacttcggctacagcaccccctgggggtattttgacttcaacagattccactgccacttctcaccacgtgactggcagcgactcatcaacaacaactggggattccggcctaagcgactcaacttcaagctcttcaacattcaggtcaaagaggttacggacaacaatggagtcaagaccatcgccaataaccttaccagcacggtccaggtcttcacggactcagactatcagctcccgtacgtgctcgggtcggctcacgagggctgcctcccgccgttcccagcggacgttttcatgattcctcagtacgggtatctgacgcttaatgatggaagccaggccgtgggtcgttcgtccttttactgcctggaatatttcccgtcgcaaatgctaagaacgggtaacaacttccagttcagctacgagtttgagaacgtacctttccatagcagctacgctcacagccaaagcctggaccgactaatgaatccactcatcgaccaatacttgtactatctctcaaagactattaacggttctggacagaatcaacaaacgctaaaattcagtgtggccggacccagcaacatggctgtccagggaagaaactacatacctggacccagctaccgacaacaacgtgtctcaaccactgtgactcaaaacaacaacagcgaatttgcttggcctggagcttcttcttgggctctcaatggacgtaatagcttgatgaatcctggacctgctatggccagccacaaagaaggagaggaccgtttctttcctttgtctggatctttaatttttggcaaacaaggaactggaagagacaacgtggatgcggacaaagtcatgataaccaacgaagaagaaattaaaactactaacccggtagcaacggagtcctatggacaggtcgctacgaatcatcagtctccgctgaatggtgcggtgcatctgtatgcgcaggcgcagctgtctccggtgaagaatcaaggaatacttccgggtatggtttggcaggacagagatgtgtacctgcaaggacccatttgggccaaaattcctcacacggacggcaactttcacccttctccgctgatgggagggtttggaatgaagcacccgcctcctcagatcctcatcaaaaacacacctgtacctgccgatcctccaacggccttcaacaaggacaagctgaactctttcatcacccagtattctactggccaagtcagcgtggagatcgagtgggagctgcagaaggaaaacagcaagcggtggaacccggagatccagtacacttccaactattacaagtctaataatgttgaatttgctgttaatactgaaggtgtatatagtgaaccccgccccattggcaccagatacctgactcgtaatctgtaa

SEQ ID NO: 8 - protein, 743 aa, synthetic construct
MAADGYLPDWLEDNLSEGIREWWALKPGAPQPKANQQHQDNARGLVLPGYKYLGPGNGLDKGEPVNAADAAALEHDKAYDQQLKAGDNPYLKYNHADAEFQERLKEDTSFGGNLGRAVFQAKKRLLEPLGLVEEAAKTAPGKKRPVEQSPQEPDSSAGIGKSGAQPAKKRLNFGQTGDTESVPDPQPIGEPPAAPSGVGSLTMASGGGAPVADNNEGADGVGSSSGNWHCDSQWLGDRVITTSTRTWALPTYNNHLYKQISNSTSGGSSNDNAYFGYSTPWGYFDFNRFHCHFSPRDWQRLINNNWGFRPKRLNFKLFNIQVKEVTDNNGVKTIANNLTSTVQVFTDSDYQLPYVLGSAHEGCLPPFPADVFMIPQYGYLTLNDGSQAVGRSSFYCLEYFPSQMLRTGNNFQFSYEFENVPFHSSYAHSQSLDRLMNPLIDQYLYYLSKTINGSGQNQQTLKFSVAGPSNMAVQGRNYIPGPSYRQQRVSTTVTQNNNSEFAWPGASSWALNGRNSLMNPGPAMASHKEGEDRFFPLSGSLIFGKQGTGRDNVDADKVMITNEEEIKTTNPVATESYGQVATNHQSPLNGAVHLYAQAQLSPVKNQGILPGMVWQDRDVYLQGPIWAKIPHTDGNFHPSPLMGGFGMKHPPPQILIKNTPVPADPPTAFNKDKLNSFITQYSTGQVSVEIEWELQKENSKRWNPEIQYTSNYYKSNNVEFAVNTEGVYSEPRPIGTRYLTRNL

SEQ ID NO: 9 - DNA, 57 bp, synthetic construct
  source 1..57: mol_type = other DNA
ccgctgaatggtgcggtgcatctgtatgcgcaggcgcagctgtctccggtgaagaat

SEQ ID NO: 10 - skipped

SEQ ID NO: 11 - protein, 736 aa, synthetic construct
MAADGYLPDWLEDNLSEGIREWWALKPGAPQPKANQQHQDNARGLVLPGYKYLGPGNGLDKGEPVNAADAAALEHDKAYDQQLKAGDNPYLKYNHADAEFQERLKEDTSFGGNLGRAVFQAKKRLLEPLGLVEEAAKTAPGKKRPVEQSPQEPDSSAGIGKSGAQPAKKRLNFGQTGDTESVPDPQPIGEPPAAPSGVGSLTMASGGGAPVADNNEGADGVGSSSGNWHCDSQWLGDRVITTSTRTWALPTYNNHLYKQISNSTSGGSSNDNAYFGYSTPWGYFDFNRFHCHFSPRDWQRLINNNWGFRPKRLNFKLFNIQVKEVTDNNGVKTIANNLTSTVQVFTDSDYQLPYVLGSAHEGCLPPFPADVFMIPQYGYLTLNDGSQAVGRSSFYCLEYFPSQMLRTGNNFQFSYEFENVPFHSSYAHSQSLDRLMNPLIDQYLYYLSRTINGSGQNQQTLKFSVAGPSNMAVQGRNYIPGPSYRQQRVSTTVTQNNNSEFAWPGASSWALNGRNSLMNPGPAMASHKEGEDRFFPLSGSLIFGKQGTGRDNVDADKVMITNEEEIKTTNPVATESYGQVATNHQSAQAQAQTGWVQNQGILPGMVWQDRDVYLQGPIWAKIPHTDGNFHPSPLMGGFGMKHPPPQILIKNTPVPADPPTAFNKDKLNSFITQYSTGQVSVEIEWELQKENSKRWNPEIQYTSNYYKSNNVEFAVNTEGVYSEPRPIGTRYLTRNL

SEQ ID NO: 12 - protein, 743 aa, synthetic construct
MAADGYLPDWLEDNLSEGIREWWALKPGAPQPKANQQHQDNARGLVLPGYKYLGPGNGLDKGEPVNAADAAALEHDKAYDQQLKAGDNPYLKYNHADAEFQERLKEDTSFGGNLGRAVFQAKKRLLEPLGLVEEAAKTAPGKKRPVEQSPQEPDSSAGIGKSGAQPAKKRLNFGQTGDTESVPDPQPIGEPPAAPSGVGSLTMASGGGAPVADNNEGADGVGSSSGNWHCDSQWLGDRVITTSTRTWALPTYNNHLYKQISNSTSGGSSNDNAYFGYSTPWGYFDFNRFHCHFSPRDWQRLINNNWGFRPKRLNFKLFNIQVKEVTDNNGVKTIANNLTSTVQVFTDSDYQLPYVLGSAHEGCLPPFPADVFMIPQYGYLTLNDGSQAVGRSSFYCLEYFPSQMLRTGNNFQFSYEFENVPFHSSYAHSQSLDRLMNPLIDQYLYYLSRTINGSGQNQQTLKFSVAGPSNMAVQGRNYIPGPSYRQQRVSTTVTQNNNSEFAWPGASSWALNGRNSLMNPGPAMASHKEGEDRFFPLSGSLIFGKQGTGRDNVDADKVMITNEEEIKTTNPVATESYGQVATNHQSAQTLAVPFKAQAQTGWVQNQGILPGMVWQDRDVYLQGPIWAKIPHTDGNFHPSPLMGGFGMKHPPPQILIKNTPVPADPPTAFNKDKLNSFITQYSTGQVSVEIEWELQKENSKRWNPEIQYTSNYYKSNNVEFAVNTEGVYSEPRPIGTRYLTRNL

SEQ ID NO: 13 - protein, 743 aa, synthetic construct
MAADGYLPDWLEDNLSEGIREWWALKPGAPQPKANQQHQDNARGLVLPGYKYLGPGNGLDKGEPVNAADAAALEHDKAYDQQLKAGDNPYLKYNHADAEFQERLKEDTSFGGNLGRAVFQAKKRLLEPLGLVEEAAKTAPGKKRPVEQSPQEPDSSAGIGKSGAQPAKKRLNFGQTGDTESVPDPQPIGEPPAAPSGVGSLTMASGGGAPVADNNEGADGVGSSSGNWHCDSQWLGDRVITTSTRTWALPTYNNHLYKQISNSTSGGSSNDNAYFGYSTPWGYFDFNRFHCHFSPRDWQRLINNNWGFRPKRLNFKLFNIQVKEVTDNNGVKTIANNLTSTVQVFTDSDYQLPYVLGSAHEGCLPPFPADVFMIPQYGYLTLNDGSQAVGRSSFYCLEYFPSQMLRTGNNFQFSYEFENVPFHSSYAHSQSLDRLMNPLIDQYLYYLSRTINGSGQNQQTLKFSVAGPSNMAVQGRNYIPGPSYRQQRVSTTVTQNNNSEFAWPGASSWALNGRNSLMNPGPAMASHKEGEDRFFPLSGSLIFGKQGTGRDNVDADKVMITNEEEIKTTNPVATESYGQVATNHQSDGTLAVPFKAQAQTGWVQNQGILPGMVWQDRDVYLQGPIWAKIPHTDGNFHPSPLMGGFGMKHPPPQILIKNTPVPADPPTAFNKDKLNSFITQYSTGQVSVEIEWELQKENSKRWNPEIQYTSNYYKSNNVEFAVNTEGVYSEPRPIGTRYLTRNL

SEQ ID NO: 14 - protein, 738 aa, unidentified
MAADGYLPDWLEDNLSEGIREWWDLKPGAPKPKANQQKQDDGRGLVLPGYKYLGPFNGLDKGEPVNAADAAALEHDKAYDQQLKAGDNPYLRYNHADAEFQERLQEDTSFGGNLGRAVFQAKKRVLEPLGLVEEGAKTAPGKKRPVEPSPQRSPDSSTGIGKKGQQPAKKRLNFGQTGDSESVPDPQPIGEPPAGPSGLGSGTMAAGGGAPMADNNEGADGVGSSSGNWHCDSTWLGDRVITTSTRTWALPTYNNHLYKQISNGTSGGSTNDNTYFGYSTPWGYFDFNRFHCHFSPRDWQRLINNNWGFRPKRLNFKLFNIQVKEVTQNEGTKTIANNLTSTIQVFTDSEYQLPYVLGSAHQGCLPPFPADVFMIPQYGYLTLNNGSQAVGRSSFYCLEYFPSQMLRTGNNFEFSYQFEDVPFHSSYAHSQSLDRLMNPLIDQYLYYLSRTQSTGGTAGTQQLLFSQAGPNNMSAQAKNWLPGPCYRQQRVSTTLSQNNNSNFAWTGATKYHLNGRDSLVNPGVAMATHKDDEERFFPSSGVLMFGKQGAGKDNVDYSSVMLTSEEEIKTTNPVATEQYGVVADNLQQQNAAPIVGAVNSQGALPGMVWQNRDVYLQGPIWAKIPHTDGNFHPSPLMGGFGLKHPPPQILIKNTPVPADPPTTFSQAKLASFITQYSTGQVSVEIEWELQKENSKRWNPEIQYTSNYYKSTNVDFAVNTDGTYSEPRPIGTRYLTRNL

SEQ ID NO: 15 - DNA, 2217 bp, unidentified
  source 1..2217: mol_type = unassigned DNA
atggctgccgatggttatcttccagattggctcgaggacaacctctctgagggcattcgcgagtggtgggacttgaaacctggagccccgaaacccaaagccaaccagcaaaagcaggacgacggccggggtctggtgcttcctggctacaagtacctcggacccttcaacggactcgacaagggggagcccgtcaacgcggcggacgcagcggccctcgagcacgacaaggcctacgaccagcagctcaaagcgggtgacaatccgtacctgcggtataaccacgccgacgccgagtttcaggagcgtctgcaagaagatacgtcttttgggggcaacctcgggcgagcagtcttccaggccaagaagcgggttctcgaacctctcggtctggttgaggaaggcgctaagacggctcctggaaagaagagaccggtagagccatcaccccagcgttctccagactcctctacgggcatcggcaagaaaggccagcagcccgcgaaaaagagactcaactttgggcagactggcgactcagagtcagtgcccgaccctcaaccaatcggagaaccccccgcaggcccctctggtctgggatctggtacaatggctgcaggcggtggcgctccaatggcagacaataacgaaggcgccgacggagtgggtagttcctcaggaaattggcattgcgattccacatggctgggcgacagagtcatcaccaccagcacccgaacctgggccctccccacctacaacaaccacctctacaagcaaatctccaacgggacttcgggaggaagcaccaacgacaacacctacttcggctacagcaccccctgggggtattttgactttaacagattccactgccacttctcaccacgtgactggcagcgactcatcaacaacaactggggattccggcccaagagactcaacttcaagctcttcaacatccaggtcaaggaggtcacgcagaatgaaggcaccaagaccatcgccaataaccttaccagcacgattcaggtctttacggactcggaataccagctcccgtacgtcctcggctctgcgcaccagggctgcctgcctccgttcccggcggacgtcttcatgattcctcagtacgggtacctgactctgaacaatggcagtcaggccgtgggccgttcctccttctactgcctggagtactttccttctcaaatgctgagaacgggcaacaactttgagttcagctaccagtttgaggacgtgccttttcacagcagctacgcgcacagccaaagcctggaccggctgatgaaccccctcatcgaccagtacctgtactacctgtctcggactcagtccacgggaggtaccgcaggaactcagcagttgctattttctcaggccgggcctaataacatgtcggctcaggccaaaaactggctacccgggccctgctaccggcagcaacgcgtctccacgacactgtcgcaaaataacaacagcaactttgcctggaccggtgccaccaagtatcatctgaatggcagagactctctggtaaatcccggtgtcgctatggcaacccacaaggacgacgaagagcgattttttccgtccagcggagtcttaatgtttgggaaacagggagctggaaaagacaacgtggactatagcagcgttatgctaaccagtgaggaagaaattaaaaccaccaacccagtggccacagaacagtacggcgtggtggccgataacctgcaacagcaaaacgccgctcctattgtaggggccgtcaacagtcaaggagccttacctggcatggtctggcagaaccgggacgtgtacctgcagggtcctatctgggccaagattcctcacacggacggaaactttcatccctcgccgctgatgggaggctttggactgaaacacccgcctcctcagatcctgattaagaatacacctgttcccgcggatcctccaactaccttcagtcaagctaagctggcgtcgttcatcacgcagtacagcaccggacaggtcagcgtggaaattgaatgggagctgcagaaagaaaacagcaaacgctggaacccagagattcaatacacttccaactactacaaatctacaaatgtggactttgctgttaacacagatggcacttattctgagcctcgccccatcggcacccgttacctcacccgtaatctgtaa

SEQ ID NO: 16 - protein, 735 aa, Adeno-associated virus 2 [sequence omitted]

SEQ ID NO: 17 - DNA, 2208 bp, Adeno-associated virus 2
  source 1..2208: mol_type = genomic DNA
atggctgccgatggttatcttccagattggctcgaggacactctctctgaaggaataagacagtggtggaagctcaaacctggcccaccaccaccaaagcccgcagagcggcataaggacgacagcaggggtcttgtgcttcctgggtacaagtacctcggacccttcaacggactcgacaagggagagccggtcaacgaggcagacgccgcggccctcgagcacgacaaagcctacgaccggcagctcgacagcggagacaacccgtacctcaagtacaaccacgccgacgcggagtttcaggagcgccttaaagaagatacgtcttttgggggcaacctcggacgagcagtcttccaggcgaaaaagagggttcttgaacctctgggcctggttgaggaacctgttaagacggctccgggaaaaaagaggccggtagagcactctcctgtggagccagactcctcctcgggaaccggaaaggcgggccagcagcctgcaagaaaaagattgaattttggtcagactggagacgcagactcagtacctgacccccagcctctcggacagccaccagcagccccctctggtctgggaactaatacgatggctacaggcagtggcgcaccaatggcagacaataacgagggcgccgacggagtgggtaattcctcgggaaattggcattgcgattccacatggatgggcgacagagtcatcaccaccagcacccgaacctgggccctgcccacctacaacaaccacctctacaaacaaatttccagccaatcaggagcctcgaacgacaatcactactttggctacagcaccccttgggggtattttgacttcaacagattccactgccacttttcaccacgtgactggcaaagactcatcaacaacaactggggattccgacccaagagactcaacttcaagctctttaacattcaagtcaaagaggtcacgcagaatgacggtacgacgacgattgccaataaccttaccagcacggttcaggtgtttactgactcggagtaccagctcccgtacgtcctcggctcggcgcatcaaggatgcctcccgccgttcccagcagacgtcttcatggtgccacagtatggatacctcaccctgaacaacgggagtcaggcagtaggacgctcttcattttactgcctggagtactttccttctcagatgctgcgtaccggaaacaactttaccttcagctacacttttgaggacgttcctttccacagcagctacgctcacagccagagtctggaccgtctcatgaatcctctcatcgaccagtacctgtattacttgagcagaacaaacactccaagtggaaccaccacgcagtcaaggcttcagttttctcaggccggagcgagtgacattcgggaccagtctaggaactggcttcctggaccctgttaccgccagcagcgagtatcaaagacatctgcggataacaacaacagtgaatactcgtggactggagctaccaagtaccacctcaatggcagagactctctggtgaatccgggcccggccatggcaagccacaaggacgatgaagaaaagttttttcctcagagcggggttctcatctttgggaagcaaggctcagagaaaacaaatgtggacattgaaaaggtcatgattacagacgaagaggaaatcaggacaaccaatcccgtggctacggagcagtatggttctgtatctaccaacctccagagaggcaacagacaagcagctaccgcagatgtcaacacacaaggcgttcttccaggcatggtctggcaggacagagatgtgtaccttcaggggcccatctgggcaaagattccacacacggacggacattttcacccctctcccctcatgggtggattcggacttaaacaccctcctccacagattctcatcaagaacaccccggtacctgcgaatccttcgaccaccttcagtgcggcaaagtttgcttccttcatcacacagtactccacgggacaggtcagcgtggagatcgagtgggagctgcagaaggaaaacagcaaacgctggaatcccgaaattcagtacacttccaactacaacaagtctgttaatgtggactttactgtggacactaatggcgtgtattcagagcctcgccccattggcaccagatacctgactcgtaatctgtaa

SEQ ID NO: 18 - protein, 736 aa, Adeno-associated virus 1
MAADGYLPDWLEDNLSEGIREWWDLKPGAPKPKANQQKQDDGRGLVLPGYKYLGPFNGLDKGEPVNAADAAALEHDKAYDQQLKAGDNPYLRYNHADAEFQERLQEDTSFGGNLGRAVFQAKKRVLEPLGLVEEGAKTAPGKKRPVEQSPQEPDSSSGIGKTGQQPAKKRLNFGQTGDSESVPDPQPLGEPPATPAAVGPTTMASGGGAPMADNNEGADGVGNASGNWHCDSTWLGDRVITTSTRTWALPTYNNHLYKQISSASTGASNDNHYFGYSTPWGYFDFNRFHCHFSPRDWQRLINNNWGFRPKRLNFKLFNIQVKEVTTNDGVTTIANNLTSTVQVFSDSEYQLPYVLGSAHQGCLPPFPADVFMIPQYGYLTLNNGSQAVGRSSFYCLEYFPSQMLRTGNNFTFSYTFEEVPFHSSYAHSQSLDRLMNPLIDQYLYYLNRTQNQSGSAQNKDLLFSRGSPAGMSVQPKNWLPGPCYRQQRVSKTKTDNNNSNFTWTGASKYNLNGRESIINPGTAMASHKDDEDKFFPMSGVMIFGKESAGASNTALDNVMITDEEEIKATNPVATERFGTVAVNFQSSSTDPATGDVHAMGALPGMVWQDRDVYLQGPIWAKIPHTDGHFHPSPLMGGFGLKNPPPQILIKNTPVPANPPAEFSATKFASFITQYSTGQVSVEIEWELQKENSKRWNPEVQYTSNYAKSANVDFTVDNNGLYTEPRPIGTRYLTRPL

SEQ ID NO: 19 - DNA, 2211 bp, Adeno-associated virus 1
  source 1..2211: mol_type = genomic DNA
atggctgccgatggttatcttccagattggctcgaggacaacctctctgagggcattcgcgagtggtgggacttgaaacctggagccccgaagcccaaagccaaccagcaaaagcaggacgacggccggggtctggtgcttcctggctacaagtacctcggacccttcaacggactcgacaagggggagcccgtcaacgcggcggacgcagcggccctcgagcacgacaaggcctacgaccagcagctcaaagcgggtgacaatccgtacctgcggtataaccacgccgacgccgagtttcaggagcgtctgcaagaagatacgtcttttgggggcaacctcgggcgagcagtcttccaggccaagaagcgggttctcgaacctctcggtctggttgaggaaggcgctaagacggctcctggaaagaaacgtccggtagagcagtcgccacaagagccagactcctcctcgggcatcggcaagacaggccagcagcccgctaaaaagagactcaattttggtcagactggcgactcagagtcagtccccgatccacaacctctcggagaacctccagcaacccccgctgctgtgggacctactacaatggcttcaggcggtggcgcaccaatggcagacaataacgaaggcgccgacggagtgggtaatgcctcaggaaattggcattgcgattccacatggctgggcgacagagtcatcaccaccagcacccgcacctgggccttgcccacctacaataaccacctctacaagcaaatctccagtgcttcaacgggggccagcaacgacaaccactacttcggctacagcaccccctgggggtattttgatttcaacagattccactgccacttttcaccacgtgactggcagcgactcatcaacaacaattggggattccggcccaagagactcaacttcaaactcttcaacatccaagtcaaggaggtcacgacgaatgatggcgtcacaaccatcgctaataaccttaccagcacggttcaagtcttctcggactcggagtaccagcttccgtacgtcctcggctctgcgcaccagggctgcctccctccgttcccggcggacgtgttcatgattccgcaatacggctacctgacgctcaacaatggcagccaagccgtgggacgttcatccttttactgcctggaatatttcccttctcagatgctgagaacgggcaacaactttaccttcagctacacctttgaggaagtgcctttccacagcagctacgcgcacagccagagcctggaccggctgatgaatcctctcatcgaccaatacctgtattacctgaacagaactcaaaatcagtccggaagtgcccaaaacaaggacttgctgtttagccgtgggtctccagctggcatgtctgttcagcccaaaaactggctacctggaccctgttatcggcagcagcgcgtttctaaaacaaaaacagacaacaacaacagcaattttacctggactggtgcttcaaaatataacctcaatgggcgtgaatccatcatcaaccctggcactgctatggcctcacacaaagacgacgaagacaagttctttcccatgagcggtgtcatgatttttggaaaagagagcgccggagcttcaaacactgcattggacaatgtcatgattacagacgaagaggaaattaaagccactaaccctgtggccaccgaaagatttgggaccgtggcagtcaatttccagagcagcagcacagaccctgcgaccggagatgtgcatgctatgggagcattacctggcatggtgtggcaagatagagacgtgtacctgcagggtcccatttgggccaaaattcctcacacagatggacactttcacccgtctcctcttatgggcggctttggactcaagaacccgcctcctcagatcctcatcaaaaacacgcctgttcctgcgaatcctccggcggagttttcagctacaaagtttgcttcattcatcacccaatactccacaggacaagtgagtgtggaaattgaatgggagctgcagaaagaaaacagcaagcgctggaatcccgaagtgcagtacacatccaattatgcaaaatctgccaacgttgattttactgtggacaacaatggactttatactgagcctcgccccattggcacccgttaccttacccgtcccctgtaa

SEQ ID NO: 20 - protein, 724 aa, Adeno-associated virus 5
MSFVDHPPDWLEEVGEGLREFLGLEAGPPKPKPNQQHQDQARGLVLPGYNYLGPGNGLDRGEPVNRADEVAREHDISYNEQLEAGDNPYLKYNHADAEFQEKLADDTSFGGNLGKAVFQAKKRVLEPFGLVEEGAKTAPTGKRIDDHFPKRKKARTEEDSKPSTSSDAEAGPSGSQQLQIPAQPASSLGADTMSAGGGGPLGDNNQGADGVGNASGDWHCDSTWMGDRVVTKSTRTWVLPSYNNHQYREIKSGSVDGSNANAYFGYSTPWGYFDFNRFHSHWSPRDWQRLINNYWGFRPRSLRVKIFNIQVKEVTVQDSTTTIANNLTSTVQVFTDDDYQLPYVVGNGTEGCLPAFPPQVFTLPQYGYATLNRDNTENPTERSSFFCLEYFPSKMLRTGNNFEFTYNFEEVPFHSSFAPSQNLFKLANPLVDQYLYRFVSTNNTGGVQFNKNLAGRYANTYKNWFPGPMGRTQGWNLGSGVNRASVSAFATTNRMELEGASYQVPPQPNGMTNNLQGSNTYALENTMIFNSQPANPGTTATYLEGNMLITSESETQPVNRVAYNVGGQMATNNQSSTTAPATGTYNLQEIVPGSVWMERDVYLQGPIWAKIPETGAHFHPSPAMGGFGLKHPPPMMLIKNTPVPGNITSFSDVPVSSFITQYSTGQVTVEMEWELKKENSKRWNPEIQYTNNYNDPQFVDFAPDSTGEYRTTRPIGTRYLTRPL

SEQ ID NO: 21 - DNA, 2175 bp, Adeno-associated virus 5
  source 1..2175: mol_type = genomic DNA
atgtcttttgttgatcaccctccagattggttggaagaagttggtgaaggtcttcgcgagtttttgggccttgaagcgggcccaccgaaaccaaaacccaatcagcagcatcaagatcaagcccgtggtcttgtgctgcctggttataactatctcggacccggaaacggtctcgatcgaggagagcctgtcaacagggcagacgaggtcgcgcgagagcacgacatctcgtacaacgagcagcttgaggcgggagacaacccctacctcaagtacaaccacgcggacgccgagtttcaggagaagctcgccgacgacacatccttcgggggaaacctcggaaaggcagtctttcaggccaagaaaagggttctcgaaccttttggcctggttgaagagggtgctaagacggcccctaccggaaagcggatagacgaccactttccaaaaagaaagaaggcccggaccgaagaggactccaagccttccacctcgtcagacgccgaagctggacccagcggatcccagcagctgcaaatcccagcccaaccagcctcaagtttgggagctgatacaatgtctgcgggaggtggcggcccattgggcgacaataaccaaggtgccgatggagtgggcaatgcctcgggagattggcattgcgattccacgtggatgggggacagagtcgtcaccaagtccacccgaacctgggtgctgcccagctacaacaaccaccagtaccgagagatcaaaagcggctccgtcgacggaagcaacgccaacgcctactttggatacagcaccccctgggggtactttgactttaaccgcttccacagccactggagcccccgagactggcaaagactcatcaacaactactggggcttcagaccccggtccctcagagtcaaaatcttcaacattcaagtcaaagaggtcacggtgcaggactccaccaccaccatcgccaacaacctcacctccaccgtccaagtgtttacggacgacgactaccagctgccctacgtcgtcggcaacgggaccgagggatgcctgccggccttccctccgcaggtctttacgctgccgcagtacggttacgcgacgctgaaccgcgacaacacagaaaatcccaccgagaggagcagcttcttctgcctagagtactttcccagcaagatgctgagaacgggcaacaactttgagtttacctacaactttgaggaggtgcccttccactccagcttcgctcccagtcagaacctcttcaagctggccaacccgctggtggaccagtacttgtaccgcttcgtgagcacaaataacactggcggagtccagttcaacaagaacctggccgggagatacgccaacacctacaaaaactggttcccggggcccatgggccgaacccagggctggaacctgggctccggggtcaaccgcgccagtgtcagcgccttcgccacgaccaataggatggagctcgagggcgcgagttaccaggtgcccccgcagccgaacggcatgaccaacaacctccagggcagcaacacctatgccctggagaacactatgatcttcaacagccagccggcgaacccgggcaccaccgccacgtacctcgagggcaacatgctcatcaccagcgagagcgagacgcagccggtgaaccgcgtggcgtacaacgtcggcgggcagatggccaccaacaaccagagctccaccactgcccccgcgaccggcacgtacaacctccaggaaatcgtgcccggcagcgtgtggatggagagggacgtgtacctccaaggacccatctgggccaagatcccagagacgggggcgcactttcacccctctccggccatgggcggattcggactcaaacacccaccgcccatgatgctcatcaagaacacgcctgtgcccggaaatatcaccagcttctcggacgtgcccgtcagcagcttcatcacccagtacagcaccgggcaggtcaccgtggagatggagtgggagctcaagaaggaaaactccaagaggtggaacccagagatccagtacacaaacaactacaacgacccccagtttgtggactttgccccggacagcaccggggaatacagaaccaccagacctatcggaacccgataccttacccgacccctttaa

SEQ ID NO: 22-39 - skipped (18 entries)

SEQ ID NO: 40 - protein, 19 aa, synthetic construct
PINGAVHLYAQAQTGWVEN

SEQ ID NO: 41 - protein, 19 aa, synthetic construct
PLNGAVHLNAQAQTGWVEN

SEQ ID NO: 42 - protein, 19 aa, synthetic construct
PLNGAVHLYAQAQSGWVEN

SEQ ID NO: 43 - protein, 19 aa, synthetic construct
PLNGAVHLYAQAQTAWVEN

SEQ ID NO: 44 - protein, 19 aa, synthetic construct
PLNGAVHLYAQAQTGCVEN

SEQ ID NO: 45 - protein, 19 aa, synthetic construct
PLNGAVHLYAQAQTGLVEN

SEQ ID NO: 46 - protein, 19 aa, synthetic construct
PVNGAVHLYAQAQTGWVEN

SEQ ID NO: 47 - protein, 19 aa, synthetic construct
SLNGAVHLYAQAQTGWVEN

SEQ ID NO: 48 - protein, 19 aa, synthetic construct
TLNGAVHLYAQAQTGWVEN

SEQ ID NO: 49 - protein, 19 aa, synthetic construct
PHNGAVHLYAQAQTGWVHN

SEQ ID NO: 50 - protein, 19 aa, synthetic construct
PINGAVHLYAQAQTGWVHN

SEQ ID NO: 51 - protein, 19 aa, synthetic construct
PLKGAVHLYAQAQTGWVHN

SEQ ID NO: 52 - protein, 19 aa, synthetic construct
PLNGAAHLYAQAQTGWVHN

SEQ ID NO: 53 - protein, 19 aa, synthetic construct
PLNGADHLYAQAQTGWVHN

SEQ ID NO: 54 - protein, 19 aa, synthetic construct
PLNGAGHLYAQAQTGWVHN

SEQ ID NO: 55 - protein, 19 aa, synthetic construct
PLNGALHLYAQAQTGWVHN

SEQ ID NO: 56 - protein, 19 aa, synthetic construct
PLNGAVDLYAQAQTGWVHN

SEQ ID NO: 57 - protein, 19 aa, synthetic construct
PLNGAVHHYAQAQTGWVHN

SEQ ID NO: 58 - protein, 19 aa, synthetic construct
PLNGAVHIYAQAQTGWVHN

SEQ ID NO: 59 - protein, 19 aa, synthetic construct
PLNGAVHLDAQAQTGWVHN

SEQ ID NO: 60 - protein, 19 aa, synthetic construct
PLNGAVHLNAQAQTGWVHN

SEQ ID NO: 61 - protein, 19 aa, synthetic construct
PLNGAVHLSAQAQTGWVHN

SEQ ID NO: 62 - protein, 19 aa, synthetic construct
PLNGAVHLYAKAQTGWVHN

SEQ ID NO: 63 - protein, 19 aa, synthetic construct
PLNGAVHLYAQAKTGWVHN

SEQ ID NO: 64 - protein, 19 aa, synthetic construct
PLNGAVHLYAQAQAGWVHN

SEQ ID NO: 65 - protein, 19 aa, synthetic construct
PLNGAVHLYAQAQRGWVHN

SEQ ID NO: 66 - protein, 19 aa, synthetic construct
PLNGAVHLYAQAQSGWVHN

SEQ ID NO: 67 - protein, 19 aa, synthetic construct
PLNGAVHLYAQAQTGCVHN

SEQ ID NO: 68 - protein, 19 aa, synthetic construct
PLNGAVHLYAQAQTGLVHN

SEQ ID NO: 69 - protein, 19 aa, synthetic construct
PLNGAVHLYAQAQVSAVHN

SEQ ID NO: 70 - protein, 19 aa, synthetic construct
PLNGAVHLYAQEQTGWVHN

SEQ ID NO: 71 - protein, 19 aa, synthetic construct
PLNGAVHLYAQGQTGWVHN

SEQ ID NO: 72 - protein, 19 aa, synthetic construct
PLNGAVHLYDQAQTGWVHN

SEQ ID NO: 73 - protein, 19 aa, synthetic construct
PLNGAVHLYGQAQTGWVHN

SEQ ID NO: 74 - protein, 19 aa, synthetic construct
PLNGAVHLYSQAQTGWVHN

SEQ ID NO: 75 - protein, 19 aa, synthetic construct
PLNGAVHRYAQAQTGWVHN

SEQ ID NO: 76 - protein, 19 aa, synthetic construct
PLNGAVHVYAQAQTGWVHN

SEQ ID NO: 77 - protein, 19 aa, synthetic construct
PLNGAVNLYAQAQTGWVHN

SEQ ID NO: 78 - protein, 19 aa, synthetic construct
PLNGAVPLYAQAQTGWVHN

SEQ ID NO: 79 - protein, 19 aa, synthetic construct
PLNGAVQLYAQAQTGWVHN

SEQ ID NO: 80 - protein, 19 aa, synthetic construct
PLNGTVHLYAQAQTGWVHN

SEQ ID NO: 81 - protein, 19 aa, synthetic construct
PRNGAVHLYAQAQTGWVHN

SEQ ID NO: 82 - protein, 19 aa, synthetic construct
PVNGAVHLYAQAQTGWVHN

SEQ ID NO: 83 - protein, 19 aa, synthetic construct
SLNGAVHLYAQAQTGWVHN

SEQ ID NO: 84 - protein, 19 aa, synthetic construct
TLNGAVHLYAQAQTGWVHN

SEQ ID NO: 85 - protein, 19 aa, synthetic construct
ALNGAVNLYAQAQTGWVKN

SEQ ID NO: 86 - protein, 19 aa, synthetic construct
KLNGAVHLYAQAQTGWVKN

SEQ ID NO: 87 - protein, 19 aa, synthetic construct
PHNGAVHLYAQAQTGWVKN

SEQ ID NO: 88 - protein, 19 aa, synthetic construct
PINGAVHLYAQAQTGWVKN

SEQ ID NO: 89 - protein, 19 aa, synthetic construct
PLKGAVHLYAQAQTGWVKN

SEQ ID NO: 90 - protein, 19 aa, synthetic construct
PLNAAVHLYAQAQTGWVKN

SEQ ID NO: 91 - protein, 19 aa, synthetic construct
PLNGAAHLYAQAQTGWVKN

SEQ ID NO: 92 - protein, 19 aa, synthetic construct
PLNGADHLYAQAQTGWVKN

SEQ ID NO: 93 - protein, 19 aa, synthetic construct
PLNGAGHLYAQAQTGWVKN

SEQ ID NO: 94 - protein, 19 aa, synthetic construct
PLNGAVDLYAQAQTGWVKN

SEQ ID NO: 95 - protein, 19 aa, synthetic construct
PLNGAVHHYAQAQTGWVKN

SEQ ID NO: 96 - protein, 19 aa, synthetic construct
PLNGAVHIYAQAQTGWVKN

SEQ ID NO: 97 - protein, 19 aa, synthetic construct
PLNGAVHLDAQAQTGWVKN

SEQ ID NO: 98 - protein, 19 aa, synthetic construct
PLNGAVHLNAQAQTGWVKN

SEQ ID NO: 99 - protein, 19 aa, synthetic construct
PLNGAVHLSAQAQTGWVKN

SEQ ID NO: 100 - protein, 19 aa, synthetic construct
PLNGAVHLYAEAQTGWVKN

SEQ ID NO: 101 - protein, 19 aa, synthetic construct
PLNGAVHLYAHAQTGWVKN

SEQ ID NO: 102 - protein, 19 aa, synthetic construct
PLNGAVHLYALAQTGWVKN

SEQ ID NO: 103 - protein, 19 aa, synthetic construct
PLNGAVHLYAPAQTGWVKN

SEQ ID NO: 104 - protein, 19 aa, synthetic construct
PLNGAVHLYAQAETGWVKN

SEQ ID NO: 105 - protein, 19 aa, synthetic construct
PLNGAVHLYAQAQKGWVKN

SEQ ID NO: 106 - protein, 19 aa, synthetic construct
PLNGAVHLYAQAQPGWVKN

SEQ ID NO: 107 - protein, 19 aa, synthetic construct
PLNGAVHLYAQAQSGWVKN

SEQ ID NO: 108 - protein, 19 aa, synthetic construct
PLNGAVHLYAQAQSSLVKN

SEQ ID NO: 109 - protein, 19 aa, synthetic construct
PLNGAVHLYAQAQSSSVKN

SEQ ID NO: 110 - protein, 19 aa, synthetic construct
PLNGAVHLYAQAQTACVKN

SEQ ID NO: 111 - protein, 19 aa, synthetic construct
PLNGAVHLYAQAQTEWVKN

SEQ ID NO: 112 - protein, 19 aa, synthetic construct
PLNGAVHLYAQAQTGAVKN

SEQ ID NO: 113 - protein, 19 aa, synthetic construct
PLNGAVHLYAQAQTGCVKN

SEQ ID NO: 114 - protein, 19 aa, synthetic construct
PLNGAVHLYAQAQTGLVKN

SEQ ID NO: 115 - protein, 19 aa, synthetic construct
PLNGAVHLYAQAQTSWVKN

SEQ ID NO: 116 - protein, 19 aa, synthetic construct
PLNGAVHLYAQEQTGWVKN

SEQ ID NO: 117 - protein, 19 aa, synthetic construct
PLNGAVHLYAQSQTGWVKN

SEQ ID NO: 118 - protein, 19 aa, synthetic construct
PLNGAVHLYDQAQTGWVKN

SEQ ID NO: 119 - protein, 19 aa, synthetic construct
PLNGAVHLYEQAQTGWVKN

SEQ ID NO: 120 - protein, 19 aa, synthetic construct
PLNGAVHLYGQAQTGWVKN

SEQ ID NO: 121 - protein, 19 aa, synthetic construct
PLNGAVHLYSQAQTGLVKN

SEQ ID NO: 122 - protein, 19 aa, synthetic construct
PLNGAVHLYSQAQTGWVKN

SEQ ID NO: 123 - protein, 19 aa, synthetic construct
PLNGAVHLYTQAQTGWVKN

SEQ ID NO: 124 - protein, 19 aa, synthetic construct
PLNGAVHPYAQAQTGWVKN

SEQ ID NO: 125 - protein, 19 aa, synthetic construct
PLNGAVHRSLQAQTGWVKN

SEQ ID NO: 126 - protein, 19 aa, synthetic construct
PLNGAVHRYAQAQTGWVKN

SEQ ID NO: 127 - protein, 19 aa, synthetic construct
PLNGAVHVYAQAQTGWVKN

SEQ ID NO: 128 - protein, 19 aa, synthetic construct
PLNGAVLLYAQAQTGWVKN

SEQ ID NO: 129 - protein, 19 aa, synthetic construct
PLNGAVNLYAQAQTGCVKN

SEQ ID NO: 130 - protein, 19 aa, synthetic construct
PLNGAVNLYAQAQTGWVKN

SEQ ID NO: 131 - protein, 19 aa, synthetic construct
PLNGAVNLYDQAQTGWVKN

SEQ ID NO: 132 - protein, 19 aa, synthetic construct
PLNGAVPLYAQAQTGWVKN

SEQ ID NO: 133 - protein, 19 aa, synthetic construct
PLNGAVQLYAQAQTGWVKN

SEQ ID NO: 134 - protein, 19 aa, synthetic construct
PLNGAVRSTAQAQTGWVKN

SEQ ID NO: 135 - protein, 19 aa, synthetic construct
PLNGAVSLRAQAQTGWVKN

SEQ ID NO: 136 - protein, 19 aa, synthetic construct
PLNGAVSSRAQAQTGWVKN

SEQ ID NO: 137 - DNA, 2211 bp, synthetic construct
  source 1..2211: mol_type = other DNA
atggctgccgatggttatcttccagattggctcgaggacaaccttagtgaaggaattcgcgagtggtgggctttgaaacctggagcccctcaacccaaggcaaatcaacaacatcaagacaacgctcgaggtcttgtgcttccgggttacaaataccttggacccggcaacggactcgacaagggggagccggtcaacgcagcagacgcggcggccctcgagcacgacaaggcctacgaccagcagctcaaggccggagacaacccgtacctcaagtacaaccacgccgacgccgagttccaggagcggctcaaagaagatacgtcttttgggggcaacctcgggcgagcagtcttccaggccaaaaagaggcttcttgaacctcttggtctggttgaggaagcggctaagacggctcctggaaagaagaggcctgtagagcagtctcctcaggaaccggactcctccgcgggtattggcaaatcgggtgcacagcccgctaaaaagagactcaatttcggtcagactggcgacacagagtcagtcccagaccctcaaccaatcggagaacctcccgcagccccctcaggtgtgggatctcttacaatggcttcaggtggtggcgcaccagtggcagacaataacgaaggtgccgatggagtgggtagttcctcgggaaattggcattgcgattcccaatggctgggggacagagtcatcaccaccagcacccgaacctgggccctgcccacctacaacaatcacctctacaagcaaatctccaacagcacatctggaggatcttcaaatgacaacgcctacttcggctacagcaccccctgggggtattttgacttcaacagattccactgccacttctcaccacgtgactggcagcgactcatcaacaacaactggggattccggcctaagcgactcaacttcaagctcttcaacattcaggtcaaagaggttacggacaacaatggagtcaagaccatcgccaataaccttaccagcacggtccaggtcttcacggactcagactatcagctcccgtacgtgctcgggtcggctcacgagggctgcctcccgccgttcccagcggacgttttcatgattcctcagtacgggtatctgacgcttaatgatggaagccaggccgtgggtcgttcgtccttttactgcctggaatatttcccgtcgcaaatgctaagaacgggtaacaacttccagttcagctacgagtttgagaacgtacctttccatagcagctacgctcacagccaaagcctggaccgactaatgaatccactcatcgaccaatacttgtactatctctcaaagactattaacggttctggacagaatcaacaaacgctaaaattcagtgtggccggacccagcaacatggctgtccagggaagaaactacatacctggacccagctaccgacaacaacgtgtctcaaccactgtgactcaaaacaacaacagcgaatttgcttggcctggagcttcttcttgggctctcaatggacgtaatagcttgatgaatcctggacctgctatggccagccacaaagaaggagaggaccgtttctttcctttgtctggatctttaatttttggcaaacaaggaactggaagagacaacgtggatgcggacaaagtcatgataaccaacgaagaagaaattaaaactactaacccggtagcaacggagtcctatggacaagtggccacaaaccaccagagtgcccaagcacaggcgcagaccggctgggttcaaaaccaaggaatacttccgggtatggtttggcaggacagagatgtgtacctgcaaggacccatttgggccaaaattcctcacacggacggcaactttcacccttctccgctgatgggagggtttggaatgaagcacccgcctcctcagatcctcatcaaaaacacacctgtacctgcggatcctccaacggccttcaacaaggacaagctgaactctttcatcacccagtattctactggccaagtcagcgtggagatcgagtgggagctgcagaaggaaaacagcaagcgctggaacccggagatccagtacacttccaactattacaagtctaataatgttgaatttgctgttaatactgaaggtgtatatagtgaaccccgccccattggcaccagatacctgactcgtaatctgtaa

SEQ ID NO: 138 - protein, 736 aa, synthetic construct
MAADGYLPDWLEDNLSEGIREWWALKPGAPQPKANQQHQDNARGLVLPGYKYLGPGNGLDKGEPVNAADAAALEHDKAYDQQLKAGDNPYLKYNHADAEFQERLKEDTSFGGNLGRAVFQAKKRLLEPLGLVEEAAKTAPGKKRPVEQSPQEPDSSAGIGKSGAQPAKKRLNFGQTGDTESVPDPQPIGEPPAAPSGVGSLTMASGGGAPVADNNEGADGVGSSSGNWHCDSQWLGDRVITTSTRTWALPTYNNHLYKQISNSTSGGSSNDNAYFGYSTPWGYFDFNRFHCHFSPRDWQRLINNNWGFRPKRLNFKLFNIQVKEVTDNNGVKTIANNLTSTVQVFTDSDYQLPYVLGSAHEGCLPPFPADVFMIPQYGYLTLNDGSQAVGRSSFYCLEYFPSQMLRTGNNFQFSYEFENVPFHSSYAHSQSLDRLMNPLIDQYLYYLSKTINGSGQNQQTLKFSVAGPSNMAVQGRNYIPGPSYRQQRVSTTVTQNNNSEFAWPGASSWALNGRNSLMNPGPAMASHKEGEDRFFPLSGSLIFGKQGTGRDNVDADKVMITNEEEIKTTNPVATESYGQVATNHQSAQAQAQTGWVQNQGILPGMVWQDRDVYLQGPIWAKIPHTDGNFHPSPLMGGFGMKHPPPQILIKNTPVPADPPTAFNKDKLNSFITQYSTGQVSVEIEWELQKENSKRWNPEIQYTSNYYKSNNVEFAVNTEGVYSEPRPIGTRYLTRNL

SEQ ID NO: 139 - protein, 19 aa, synthetic construct
QLNGAVHLYAQAQLSPVQN

SEQ ID NO: 140 - protein, 19 aa, synthetic construct
PLDGAVHLYAQPQTGWVQN

SEQ ID NO: 141 - protein, 19 aa, synthetic construct
QLNGAVHLYAQAQTMSVQN

SEQ ID NO: 142 - protein, 19 aa, synthetic construct
PLDSSVHLYAQAQTGWVQN

SEQ ID NO: 143 - protein, 19 aa, synthetic construct
PLNGAVHLYAQAQTTKVQN

SEQ ID NO: 144 - protein, 19 aa, synthetic construct
PLDGAVHLYAQAQTGSVQN

SEQ ID NO: 145 - protein, 19 aa, synthetic construct
ALNGAVHLYAQAQTTSVQN

SEQ ID NO: 146 - protein, 19 aa, synthetic construct
PLNGSVHLYAQAQTMSVQN

SEQ ID NO: 147 - protein, 19 aa, synthetic construct
QLNGAVHLYAQAQTSPVQN

SEQ ID NO: 148 - protein, 19 aa, synthetic construct
PLNGAVHLYAQAQTMKVQN

SEQ ID NO: 149 - protein, 19 aa, synthetic construct
PLNGAVHLYAQAQVAQVQN

SEQ ID NO: 150 - protein, 19 aa, synthetic construct
PLDGAVHLYAQAQTGGVQN

SEQ ID NO: 151 - protein, 19 aa, synthetic construct
PLNGAVHLYAQAQTAWDQN

SEQ ID NO: 152 - protein, 19 aa, synthetic construct
PLNGSVHLYAQAQTGWDQN

SEQ ID NO: 153 - protein, 19 aa, synthetic construct
PLNGAVHLYAQAQTGSVQH

SEQ ID NO: 154 - protein, 19 aa, synthetic construct
PLNGAVHLYAQAQVKQVQN

SEQ ID NO: 155 - protein, 19 aa, synthetic construct
PLNGAVHLYAQAQSAPVQN

SEQ ID NO: 156 - protein, 19 aa, synthetic construct
PLNGAVHLYAQAQLSKVQN

SEQ ID NO: 157 - protein, 19 aa, synthetic construct
PLNGAVHLYAQAQLAPVQN

SEQ ID NO: 158 - protein, 19 aa, synthetic construct
PLNGAVHLYAQAQLAQVQN

SEQ ID NO: 159 - protein, 19 aa, synthetic construct
QLNGAVHLYAQAQVASVQN

SEQ ID NO: 160 - protein, 19 aa, synthetic construct
PLNGAVHLYAQAQTAKVQN

SEQ ID NO: 161 - protein, 19 aa, synthetic construct
PLNGAVHLYAQAQSAKVQN

SEQ ID NO: 162 - protein, 19 aa, synthetic construct
PLNGAVHLYAQAQTGCFQN

SEQ ID NO: 163 - protein, 19 aa, synthetic construct
PLNGAVHLYAQAQTQKVQN

SEQ ID NO: 164 - protein, 19 aa, synthetic construct
PLNGSVHLYAQAQTTSVQN

SEQ ID NO: 165 - protein, 19 aa, synthetic construct
PLNGGVHLYAQAQTGRVQN

SEQ ID NO: 166 - protein, 19 aa, synthetic construct
PLNGAVHLYAQAQTVAVQN

SEQ ID NO: 167 - protein, 19 aa, synthetic construct
ALNGAVHLYAQAQSSPVQN

SEQ ID NO: 168 - protein, 19 aa, synthetic construct
PLNGAVHLYAQAQLSPVQN

SEQ ID NO: 169 - protein, 19 aa, synthetic construct
QLNGAVHLYAQAQTTSVQN

SEQ ID NO: 170 - protein, 19 aa, synthetic construct
PLNGAVHLYAQAQTTQVQN

SEQ ID NO: 171 - protein, 19 aa, synthetic construct
PLNGAVHLYAQAQTAQVQN

SEQ ID NO: 172 - protein, 19 aa, synthetic construct
QLNGAVHLYAQAQTVAVQN

SEQ ID NO: 173 - protein, 19 aa, synthetic construct
PLNGAVHLYAQAQRIAVQN

SEQ ID NO: 174 - protein, 19 aa, synthetic construct
PLNGAVHLYAQAQRASVQN

SEQ ID NO: 175 - protein, 19 aa, synthetic construct
PLNGAVHLYAQAQTTPVQN

SEQ ID NO: 176 - protein, 19 aa, synthetic construct
QLNGAVHLYAQAQLASVQN

SEQ ID NO: 177 - protein, 19 aa, synthetic construct
PLNGAVHLYAQAQLTPVQN

SEQ ID NO: 178 - protein, 19 aa, synthetic construct
PLNGAVHLYAQAQSTPVQN

SEQ ID NO: 179 - protein, 19 aa, synthetic construct
PLNGAVHLYAQAQTSPVQN

SEQ ID NO: 180 - protein, 19 aa, synthetic construct
QLNGAVHLYAQAQVSQVQN

SEQ ID NO: 181 - protein, 19 aa, synthetic construct
PLNGAVHLYAQAQTMQVQN

SEQ ID NO: 182 - protein, 19 aa, synthetic construct
PLNGAVHLYAQAQTSKVQN

SEQ ID NO: 183 - protein, 19 aa, synthetic construct
SLNGAVHLYAQAQVSPVQN

SEQ ID NO: 184 - protein, 19 aa, synthetic construct
PLNGAVHLYAQAQVSQVQN

SEQ ID NO: 185 - protein, 19 aa, synthetic construct
PLNGAVHLYAQAQVSPVQN

SEQ ID NO: 186 - protein, 19 aa, synthetic construct
PLNGAVHLYAQAQTVQVQN

SEQ ID NO: 187 - protein, 19 aa, synthetic construct
PLNGAVHLYAQAQVTAVQN

SEQ ID NO: 188 - protein, 19 aa, synthetic construct
PLNGAVHLYAQAQRQPVQN

SEQ ID NO: 189 - protein, 19 aa, synthetic construct
PLNGNVHLYAQAQTGGVQN

SEQ ID NO: 190 - protein, 19 aa, synthetic construct
PLDGAVHLYAQAQTAWVQN

SEQ ID NO: 191 - protein, 19 aa, synthetic construct
PLNGAVHLYAQAQISGVQN

SEQ ID NO: 192 - protein, 19 aa, synthetic construct
PLNGAVHLYAQAQVRPVQN

SEQ ID NO: 193 - protein, 19 aa, synthetic construct
PLNGAVHLYAQAQLGPVQN

SEQ ID NO: 194 - protein, 19 aa, synthetic construct
PLNGAVHLYAQAQTNQVQN

SEQ ID NO: 195 - protein, 19 aa, synthetic construct
PLNGAVHLYAQAQVQQVQN

SEQ ID NO: 196 - protein, 19 aa, synthetic construct
PLNGAVHLYAQAQVANVQN

SEQ ID NO: 197 - protein, 19 aa, synthetic construct
PLNGAVHLYAQAQAAPVQN

SEQ ID NO: 198 - protein, 19 aa, synthetic construct
QLNGAVHLYAQAQVAQVQN

SEQ ID NO: 199 - protein, 19 aa, synthetic construct
PLNGAVHLYAQAQRSTVQN

SEQ ID NO: 200 - protein, 19 aa, synthetic construct
PLNGAVHLYAQAQTMAVQN

SEQ ID NO: 201 - protein, 19 aa, synthetic construct
PLNGAVHLYAQAQIQPVQN

SEQ ID NO: 202 - protein, 19 aa, synthetic construct
PLNGAVHLYAQAQIASVQN

SEQ ID NO: 203 - protein, 19 aa, synthetic construct
PLNGAVHLYAQAQTVSVQN

SEQ ID NO: 204 - protein, 19 aa, synthetic construct
PLNGAVHLYAQAQRGSVQN

SEQ ID NO: 205 - protein, 19 aa, synthetic construct
PLNGAVHLYAQAQNSPVQN

SEQ ID NO: 206 - protein, 19 aa, synthetic construct
PLNGAVHLYAQAQLQPVQN

SEQ ID NO: 207 - protein, 19 aa, synthetic construct
PLNGAVHLYAQAQVTGVQN

SEQ ID NO: 208 - protein, 19 aa, synthetic construct
PLNGAVHLYAQAQVMQVQN

SEQ ID NO: 209 - protein, 19 aa, synthetic construct
PLNGAVHLYAQAQSMAVQN

SEQ ID NO: 210 - protein, 19 aa, synthetic construct
PLNGAVHLYAQAQVGKVQN

SEQ ID NO: 211 - protein, 19 aa, synthetic construct
ALNGAVHLYAQAQSAPVQN

SEQ ID NO: 212 - protein, 19 aa, synthetic construct
PLNGAVHLYAQAQIQSVQN

SEQ ID NO: 213 - protein, 19 aa, synthetic construct
PLNGAVHLYAQAQCSPVQN

SEQ ID NO: 214 - protein, 19 aa, synthetic construct
PLNGAVHLYAQAQLQRVQN

SEQ ID NO: 215 - protein, 19 aa, synthetic construct
PLNGAVHLYAQAQTAWVQH

SEQ ID NO: 216 - protein, 19 aa, synthetic construct
PLDGAVHLYAQAQTGWDQN

SEQ ID NO: 217 - protein, 19 aa, synthetic construct
PLNGAVHLYAQAQTPPVQN

SEQ ID NO: 218 - protein, 19 aa, synthetic construct
PLNGAVHLYAQAQVTKVQN

SEQ ID NO: 219 - protein, 19 aa, synthetic construct
PLNGAVHLYAQAQSSPVQN

SEQ ID NO: 220 - protein, 19 aa, synthetic construct
PLNGAVHLYAQAQAGPVQN

SEQ ID NO: 221 - protein, 19 aa, synthetic construct
PLNGAVHLYAQAQLARVQN

SEQ ID NO: 222 - protein, 19 aa, synthetic construct
PLNGAVHLYAQAQTTTVQN

SEQ ID NO: 223 - protein, 19 aa, synthetic construct
PLNGAVHLYAQAQTGGFQN

SEQ ID NO: 224 - protein, 19 aa, synthetic construct
PLNGAVHLYAQAQTLQVQN

SEQ ID NO: 225 - protein, 19 aa, synthetic construct
PLNGAVHLYAQAQTMSVQN

SEQ ID NO: 226 - protein, 19 aa, synthetic construct
QLNGAVHLYAQAQLQPVQN

SEQ ID NO: 227 - protein, 19 aa, synthetic construct
PLNGAVHLYAQAQVAKVQN

SEQ ID NO: 228 - protein, 19 aa, synthetic construct
PLNGAVHLYAQAQRAAVQN

SEQ ID NO: 229 - protein, 19 aa, synthetic construct
PLNGAVHLYAQAQTVGVQN

SEQ ID NO: 230 - protein, 19 aa, synthetic construct
PLNGAVHLYAQAQLNPVQN

SEQ ID NO: 231 - protein, 19 aa, synthetic construct
PLNGAVHLYAQAQLSQVQN

SEQ ID NO: 232 - protein, 19 aa, synthetic construct
PLNGTVHLYAQAQTGSVQN

SEQ ID NO: 233 - protein, 19 aa, synthetic construct
PLNGAVHLYAQAQTKPVQN

SEQ ID NO: 234 - protein, 19 aa, synthetic construct
PLNGAVHLYAQAQTNAVQN

SEQ ID NO: 235 - protein, 19 aa, synthetic construct
ALDGAVHLYAQAQTGWVQN

SEQ ID NO: 236 - protein, 19 aa, synthetic construct
PLNGAVHLYAQAQLATVQN

SEQ ID NO: 237 - protein, 19 aa, synthetic construct
PLNGAVHLYAQAQVTPVQN

SEQ ID NO: 238 - protein, 19 aa, synthetic construct
PLNGAVHLYAQAQVQAVQN

SEQ ID NO: 239 - protein, 19 aa, synthetic construct
PLNGAVHLYAQAQTTSVQN

SEQ ID NO: 240 - protein, 19 aa, synthetic construct
PLNGAVHLYAQAQCTPVQN

SEQ ID NO: 241 - protein, 19 aa, synthetic construct
ALNGAVHLYAQAQTGRVQN

SEQ ID NO: 242 - protein, 19 aa, synthetic construct
PLNGSVHLYAQAQTGWVQD

SEQ ID NO: 243 - protein, 19 aa, synthetic construct
PLNGAVHLYAQAQTAGVQN

SEQ ID NO: 244 - protein, 19 aa, synthetic construct
PLNGAVHLYAQAQTSQVQN

SEQ ID NO: 245 - protein, 19 aa, synthetic construct
PLNGAVHLYAQAQTMNVQN

SEQ ID NO: 246 - protein, 19 aa, synthetic construct
PLNGAVHLYAQAQTSTVQN

SEQ ID NO: 247 - protein, 19 aa, synthetic construct
PLNGAVHLYAQAQVKPVQN

SEQ ID NO: 248 - protein, 19 aa, synthetic construct
PLNGAVHLYAQAQASPVQN

SEQ ID NO: 249 - protein, 19 aa, synthetic construct
PLNGAVHLYAQAQVAAVQN

SEQ ID NO: 250 - protein, 19 aa, synthetic construct
PLNGAVHLYAQAQLKSVQN

SEQ ID NO: 251 - protein, 19 aa, synthetic construct
PLNGAVHLYAQAQIAAVQN

SEQ ID NO: 252 - protein, 19 aa, synthetic construct
PLNGAVHLYAQAQTAAVQN

SEQ ID NO: 253 - protein, 19 aa, synthetic construct
PLNGAVHLYAQAQTKAVQN

SEQ ID NO: 254 - protein, 19 aa, synthetic construct
PLNGAVHLYAQAQTGSVQS

SEQ ID NO: 255 - protein, 19 aa, synthetic construct
PLNGAVHLYAQAQVSNVQN

SEQ ID NO: 256 - protein, 19 aa, synthetic construct
PLNGAVHLYAQAQTAPVQN

SEQ ID NO: 257 - protein, 19 aa, synthetic construct
PLNGAVHLYAQAQLMPVQN

SEQ ID NO: 258 - protein, 19 aa, synthetic construct
PLNGAVHLYAQAQLHPVQN

SEQ ID NO: 259 - protein, 19 aa, synthetic construct
PLNGAVHLYAQAQRAQVQN

SEQ ID NO: 260 - protein, 19 aa, synthetic construct
PLNGAVHLYAQAQLTNVQN

SEQ ID NO: 261 - protein, 19 aa, synthetic construct
PLNGAVHLYAQAQRTTVQN

SEQ ID NO: 262 - protein, 19 aa, synthetic construct
PLNGAVHLYAQAQTSVVQN

SEQ ID NO: 263 - protein, 19 aa, synthetic construct
SLNGAVHLYAQAQTMSVQN

SEQ ID NO: 264 - protein, 19 aa, synthetic construct
ALNGAVHLYAQAQTLAVQN

SEQ ID NO: 265 - protein, 19 aa, synthetic construct
PLNGAVHLYAQAQRMSVQN

SEQ ID NO: 266 - protein, 19 aa, synthetic construct
ALNGAVHLYAQAQLTPVQN

SEQ ID NO: 267 - protein, 19 aa, synthetic construct
PLNGAVHLYAQAQVGNVQN

SEQ ID NO: 268 - protein, 19 aa, synthetic construct
PLNGAVHLYAQAQLMQVQN

SEQ ID NO: 269 - protein, 19 aa, synthetic construct
PLNGSVHLYAQAQTAQVQN

SEQ ID NO: 270 - protein, 19 aa, synthetic construct
PLNGAVHLYAQAQTATVQN

SEQ ID NO: 271 - protein, 19 aa, synthetic construct
PLNGAVHLYAQAQVHPVQN

SEQ ID NO: 272 - protein, 19 aa, synthetic construct
PLNGAVHLYAQAQVSPVQT

SEQ ID NO: 273 - protein, 19 aa, synthetic construct
PLNGAVHLYAQAQISSVQN

SEQ ID NO: 274 - protein, 19 aa, synthetic construct
PLNGAVHLYAQAQVASVQN

SEQ ID NO: 275 - protein, 19 aa, synthetic construct
PLNGAVHLYAQAQTRWDQN

SEQ ID NO: 276 - protein, 19 aa, synthetic construct
PLNGAVHLYAQAQTMTVQN

SEQ ID NO: 277 - protein, 19 aa, synthetic construct
PLNGAVHLYAQAQRSSVQN

SEQ ID NO: 278 - protein, 19 aa, synthetic construct
PLNGGVHLYAQAQTGWVRN

SEQ ID NO: 279 - protein, 19 aa, synthetic construct
PLNGAVHLYAQAQTAWVQN

SEQ ID NO: 280 - protein, 19 aa, synthetic construct
PLNGSVHLYAQAQPGWVQN

SEQ ID NO: 281 - protein, 19 aa, synthetic construct
ALNGAVHLYAQAQTGWAQN

SEQ ID NO: 282 - protein, 19 aa, synthetic construct
PLNGAVHLYAQAQRTGVQN

SEQ ID NO: 283 - protein, 19 aa, synthetic construct
ALNGAVHLYAQAQTGWVQS

SEQ ID NO: 284 - protein, 19 aa, synthetic construct
PLNGAVHLYAQAQVATVQN

SEQ ID NO: 285 - protein, 19 aa, synthetic construct
PLNGAVHLYAQAQVTSVQN

SEQ ID NO: 286 - protein, 19 aa, synthetic construct
PLNGAVHLYAQAQVSSVQN

SEQ ID NO: 287 - protein, 19 aa, synthetic construct
PLNGSVHLYAQAQTSSVQN

SEQ ID NO: 288 - protein, 19 aa, synthetic construct
PLNGAVHLYAQAQTNSVQN

SEQ ID NO: 289 - protein, 19 aa, synthetic construct
PLNGAVHLYAQAQVKAVQN

SEQ ID NO: 290 - protein, 19 aa, synthetic construct
PLNGAVHLYAQAQSGPVQN

SEQ ID NO: 291 - protein, 19 aa, synthetic construct
PLNGAVHLYAQAQTGPVQN

SEQ ID NO: 292 - protein, 19 aa, synthetic construct
PLNGAVHLYAQAQTAMVQN

SEQ ID NO: 293 - protein, 19 aa, synthetic construct
PLNGAVHLYAQAQTQPVQN

SEQ ID NO: 294 - protein, 19 aa, synthetic construct
PLNGSVHLYAQAQTGSVQN

SEQ ID NO: 295 - protein, 19 aa, synthetic construct
PLNGAVHLYAQAQTQQVQN

SEQ ID NO: 296 - protein, 19 aa, synthetic construct
PLNGAVHLYAQAQVSRVQN

SEQ ID NO: 297 - protein, 19 aa, synthetic construct
QLNGAVHLYAQAQVLPVQN

SEQ ID NO: 298 - protein, 19 aa, synthetic construct
PLNGAVHLYAQAQTGWVQP

SEQ ID NO: 299 - protein, 19 aa, synthetic construct
QLNGAVHLYAQAQLGSVQN

SEQ ID NO: 300 - protein, 19 aa, synthetic construct
PLNGAVHLYAQAQVSAVQN

SEQ ID NO: 301 - protein, 19 aa, synthetic construct
PLNGAVHLYAQAQVLSVQN

SEQ ID NO: 302 - protein, 19 aa, synthetic construct
PLNGAVHLYAQAQTQHVQN

SEQ ID NO: 303 - protein, 19 aa, synthetic construct
PLNGAVHLYAQAQLASVQN

SEQ ID NO: 304 - protein, 19 aa, synthetic construct
PLNGAVHLYAQAQQAPVQN

SEQ ID NO: 305 - protein, 19 aa, synthetic construct
PLNGAVHLYAQAQNAQVQN

SEQ ID NO: 306 - protein, 19 aa, synthetic construct
PLNGAVHLYAQAQATPVQN

SEQ ID NO: 307 - protein, 19 aa, synthetic construct
PLNGAVHLYAQAQVQPVQN

SEQ ID NO: 308 - protein, 19 aa, synthetic construct
PLNGAVHLYAQAQTTAVQN

SEQ ID NO: 309 - protein, 19 aa, synthetic construct
PLNGAVHLYAQAQTGWVRN

SEQ ID NO: 310 - protein, 19 aa, synthetic construct
PLNGAVHLYAQAQLAAVQN

SEQ ID NO: 311 - protein, 19 aa, synthetic construct
PLNGAVHLYAQAQTSPDQN

SEQ ID NO: 312 - protein, 19 aa, synthetic construct
PLNGAVHLYAQAQRSGVQN

SEQ ID NO: 313 - protein, 19 aa, synthetic construct
PLNGAVHLYAQAQTGGVQT

SEQ ID NO: 314 - protein, 19 aa, synthetic construct
PLNGAVHLYAQAQTGWVPN

SEQ ID NO: 315 - protein, 19 aa, synthetic construct
PLDSAVHLYAQAQTGWVQN

SEQ ID NO: 316 - protein, 19 aa, synthetic construct
PLNGAVHLYAQAQTTPVQT

SEQ ID NO: 317 - protein, 19 aa, synthetic construct
PLNGAVHLYAQAQLMAVQN

SEQ ID NO: 318 - protein, 19 aa, synthetic construct
PLNGAVHLYAQAQTMPVQN

SEQ ID NO: 319 - protein, 19 aa, synthetic construct
PLNGAVHHYAQAQTSPVQN

SEQ ID NO: 320 - protein, 19 aa, synthetic construct
PLNGAVHLYAQAQLANVQN

SEQ ID NO: 321 - protein, 19 aa, synthetic construct
PLNGAVHLYAQAQVSTVQN

SEQ ID NO: 322 - protein, 19 aa, synthetic construct
PLNGAVHLYAQAQSAQVQN

SEQ ID NO: 323 - protein, 19 aa, synthetic construct
PLNGAVHLYAQAQNTPVQN

SEQ ID NO: 324 - protein, 19 aa, synthetic construct
PLNGAVHLYAQAQVSSVQT

SEQ ID NO: 325 - protein, 19 aa, synthetic construct
PLNGAVHLYAQAQTVSVKN

SEQ ID NO: 326 - protein, 19 aa, synthetic construct
PLNGAVHLYAQPQTGLVQN

SEQ ID NO: 327 - protein, 19 aa, synthetic construct
PLNGAVHLYAQAQTGSVQN

SEQ ID NO: 328 - protein, 19 aa, synthetic construct
SLNGAVHLYAQAQTLPVQN

SEQ ID NO: 329 - protein, 19 aa, synthetic construct
PLNGAVHLYAQAQTGGAQN

SEQ ID NO: 330 - protein, 19 aa, synthetic construct
SLNGAVHLYAQAQTAQVQN

SEQ ID NO: 331 - protein, 19 aa, synthetic construct
PLNGAVHLYAQAQTAVVQN

SEQ ID NO: 332 - protein, 19 aa, synthetic construct
PLNGAVHLYAQAQRLGVQN

SEQ ID NO: 333 - protein, 19 aa, synthetic construct
PLNGSVHLYAQAQTGWVQH

SEQ ID NO: 334 - protein, 19 aa, synthetic construct
PLNGAVHLYAQAQRTLVQN

SEQ ID NO: 335 - protein, 19 aa, synthetic construct
SLNGAVHLYAQAQTMAVQN

SEQ ID NO: 336 - protein, 19 aa, synthetic construct
PLNGAVHLYAQAQTQMVQN

SEQ ID NO: 337 - protein, 19 aa, synthetic construct
PLNGAVHLYAQAQITPVQN

SEQ ID NO: 338 - protein, 19 aa, synthetic construct
PLNGAVHLYAQAQTVWVQK

SEQ ID NO: 339 - protein, 19 aa, synthetic construct
PLNGAVHLYAQAQRSAVQN

SEQ ID NO: 340 - protein, 19 aa, synthetic construct
PLNGAVHLYAQAQTASVQN

SEQ ID NO: 341 - protein, 19 aa, synthetic construct
PLNGAVHLYAQAQTMGVQN

SEQ ID NO: 342 - protein, 19 aa, synthetic construct
PLNGAVHLYAQAQTGGVQH

SEQ ID NO: 343 - protein, 19 aa, synthetic construct
PLNGAVHLYAQAQVQSVQN

SEQ ID NO: 344 - protein, 19 aa, synthetic construct
PLNGAVHLYAQAQTGGVQN

SEQ ID NO: 345 - protein, 19 aa, synthetic construct
SLNGAVHLYAQAQTAPVQN

SEQ ID NO: 346 - protein, 19 aa, synthetic construct
PLNGAVHLYAQAQISPVQN

SEQ ID NO: 347 - protein, 19 aa, synthetic construct
PLNGAVHLYAQPQTGWVKN

SEQ ID NO: 348 - protein, 19 aa, synthetic construct
PLNGAVHLYAQAQTGSAQN

SEQ ID NO: 349 - protein, 19 aa, synthetic construct
PLNGAVHLYAQAQTGWAQN

SEQ ID NO: 350 - protein, 19 aa, synthetic construct
PLNGAVHLYAQAQTMSVQT

SEQ ID NO: 351 - protein, 19 aa, synthetic construct
PLNGSVHLYAQAQTAWVQN

SEQ ID NO: 352 - protein, 19 aa, synthetic construct
PLNGAVHLYAQAQVGGVQN

SEQ ID NO: 353 - protein, 19 aa, synthetic construct
PLNGAVHLYAKAQTSPVQN

SEQ ID NO: 354 - protein, 19 aa, synthetic construct
PLNGAVHLYAQAQLAPVQT

SEQ ID NO: 355 - protein, 19 aa, synthetic construct
PLDGAVHLYAQAQTALVQN

SEQ ID NO: 356 - protein, 19 aa, synthetic construct
PLNGAVHLYAQAQTALVQN

SEQ ID NO: 357 - protein, 19 aa, synthetic construct
PLNGAVHLYAQAQLAGVQN

SEQ ID NO: 358 - protein, 19 aa, synthetic construct
PLNGAVHLYAQAQRTAVQN

SEQ ID NO: 359 - protein, 19 aa, synthetic construct
PLNGAVHLYAQAQRSPVQN

SEQ ID NO: 360 - protein, 19 aa, synthetic construct
PLNGAVHLYAQAQTLAVQN

SEQ ID NO: 361 - protein, 19 aa, synthetic construct
PLNGAVHLYAQAQLAHVQN

SEQ ID NO: 362 - protein, 19 aa, synthetic construct
PLNGAVHLYAQAQTSLVQN

SEQ ID NO: 363 - protein, 19 aa, synthetic construct
PLNGAVHLYAQAQRLSVQN

SEQ ID NO: 364 - protein, 19 aa, synthetic construct
PLNGAVHLYDQAQLSPVQN

SEQ ID NO: 365 - protein, 19 aa, synthetic construct
PLNGAVHLYAQAQLMGVQN

SEQ ID NO: 366 - protein, 19 aa, synthetic construct
PLNGSVHLYAQAQTGWVQT

SEQ ID NO: 367 - protein, 19 aa, synthetic construct
PLNGAVHLYAQAQSMQVQN

SEQ ID NO: 368 - protein, 19 aa, synthetic construct
PLNGGVHLYAQAQTGWFQN

SEQ ID NO: 369 - protein, 19 aa, synthetic construct
PLNGAVHLYAQAQTQTVQN

SEQ ID NO: 370 - protein, 19 aa, synthetic construct
PLDGAVHLYSQAQTGWVQN

SEQ ID NO: 371 - protein, 19 aa, synthetic construct
PLNGAVHLYAQAQTGWEQN

SEQ ID NO: 372 - protein, 19 aa, synthetic construct
PLNGAVHLYAQAQVGSVQN

SEQ ID NO: 373 - protein, 19 aa, synthetic construct
PLNGAVHLYAQAQVSGVQN

SEQ ID NO: 374 - protein, 19 aa, synthetic construct
PLNGAVHLYAQAQVMAVQN

SEQ ID NO: 375 - protein, 19 aa, synthetic construct
PLNGAVHLYAQAQIGGVQN

SEQ ID NO: 376 - protein, 19 aa, synthetic construct
PLNGAVHLYAQAQIAGVQN

SEQ ID NO: 377 - protein, 19 aa, synthetic construct
PLNGAVHLYAKAQTVSVQN

SEQ ID NO: 378 - protein, 19 aa, synthetic construct
PLNGAVHLYSQAQTGRVQN

SEQ ID NO: 379 - protein, 19 aa, synthetic construct
PLNGAVHLYAQAQLSHVQN

SEQ ID NO: 380 - protein, 19 aa, synthetic construct
PLNGAVHLYAQAQVQTVQN

SEQ ID NO: 381 - protein, 19 aa, synthetic construct
SLDGAVHLYAQAQTGWVQN

SEQ ID NO: 382 - protein, 19 aa, synthetic construct
PLNGAVHLYAQPQTGWDQN

SEQ ID NO: 383 - protein, 19 aa, synthetic construct
PLNGAVHLYAQAQRNSVQN

SEQ ID NO: 384 - protein, 19 aa, synthetic construct
PLNGAVHLYAQAQTLPVQN

SEQ ID NO: 385 - protein, 19 aa, synthetic construct
PLNGAVHLYAQAQTKQVQN

SEQ ID NO: 386 - protein, 19 aa, synthetic construct
PLNGSVHLYAQAQTGWVQN

SEQ ID NO: 387 - protein, 19 aa, synthetic construct
PLNGAVHLYAQAQLGQVQN

SEQ ID NO: 388 - protein, 19 aa, synthetic construct
SLNGAVHLYAQAQTGRVQN

SEQ ID NO: 389 - protein, 19 aa, synthetic construct
PLDGAVHLYAQAQTGWVQN

SEQ ID NO: 390 - protein, 19 aa, synthetic construct
PLNGSVHLYAQAQTGWAQN

SEQ ID NO: 391 - protein, 19 aa, synthetic construct
TLNGAVHLYAQAQVASVQN

SEQ ID NO: 392 - protein, 19 aa, synthetic construct
PLNGAVHLYAQAQNMQVQN

SEQ ID NO: 393 - protein, 19 aa, synthetic construct
PLNGAVHLYAQAQNVQVQN

SEQ ID NO: 394 - protein, 19 aa, synthetic construct
PLNGAVHLYAQAQTGSVQI

SEQ ID NO: 395 - protein, 19 aa, synthetic construct
PLNGTVHLYAQAQTGGVQN

SEQ ID NO: 396 - protein, 19 aa, synthetic construct
PLNGAVHLYAKAQVSPVQN

SEQ ID NO: 397 - protein, 19 aa, synthetic construct
PLNGAVHLYAQAQRGGVQN

SEQ ID NO: 398 - protein, 19 aa, synthetic construct
PLNGGVHLYAQAQTGLVQN

SEQ ID NO: 399 - protein, 19 aa, synthetic construct
PLNGAVHLYAQAQVMSVQN

SEQ ID NO: 400 - protein, 19 aa, synthetic construct
PLNGAVHLYAQAQTTGVQN

SEQ ID NO: 401 - protein, 19 aa, synthetic construct
PLNGAVHLYAQAQLSPVQK

SEQ ID NO: 402 - protein, 19 aa, synthetic construct
SLNGAVHLYAQAQTAAVQN

SEQ ID NO: 403 - protein, 19 aa, synthetic construct
PINGAVHLYAQAQTSPVQN

SEQ ID NO: 404 - protein, 19 aa, synthetic construct
PLNGAVHLYAQAQLSRVQN

SEQ ID NO: 405 - protein, 19 aa, synthetic construct
PLNGAVHLYAQAQVSSVQK

SEQ ID NO: 406 - protein, 19 aa, synthetic construct
PLNGAVHLYAQAQTAPVQT

SEQ ID NO: 407 - protein, 19 aa, synthetic construct
PLNGAVHLYAQAQMAPVQN

SEQ ID NO: 408 - protein, 19 aa, synthetic construct
PLNGAVHLYAQAQILGVQN

SEQ ID NO: 409 - protein, 19 aa, synthetic construct
PLNGAVHLYAQAQTASVQT

SEQ ID NO: 410 - protein, 19 aa, synthetic construct
PLNGAVHLYAQAQTGSLQN

SEQ ID NO: 411 - protein, 19 aa, synthetic construct
PLNGAVHLYAQAQTGTVQN

SEQ ID NO: 412 - protein, 19 aa, synthetic construct
PLNGGVHLYAQAQTGWVQN

SEQ ID NO: 413 - protein, 19 aa, synthetic construct
PLNGAVHLYAQAQTGSVQT

SEQ ID NO: 414 - protein, 19 aa, synthetic construct
PLNGAVHLYAQAQTSSVQT

SEQ ID NO: 415 - protein, 19 aa, synthetic construct
PLNGAVHLYAQAQTSHVQN

SEQ ID NO: 416 - protein, 19 aa, synthetic construct
PLNGGVHLYAQAQTGWDQN

SEQ ID NO: 417 - protein, 19 aa, synthetic construct
PLNGAVHLYAQAQRIGVQN

SEQ ID NO: 418 - protein, 19 aa, synthetic construct
TLNGAVHLYAQAQTTSVQN

SEQ ID NO: 419 - protein, 19 aa, synthetic construct
PLNGAVHLYAQAQTGWGQT

SEQ ID NO: 420 - protein, 19 aa, synthetic construct
PLNGAVHLYAQAQSAMVQN

SEQ ID NO: 421 - protein, 19 aa, synthetic construct
PLNGAVHLYAQAQTSMVQN

SEQ ID NO: 422 - protein, 19 aa, synthetic construct
PLNGAVHLYAQAQSMGVQN

SEQ ID NO: 423 - protein, 19 aa, synthetic construct
PLNGAVHLYAQAQSMSVQN

SEQ ID NO: 424 - protein, 19 aa, synthetic construct
PLNGAVHLYAQAQTSSVQN

SEQ ID NO: 425 - protein, 19 aa, synthetic construct
PLNGAVHLYAQAQTSGVQN

SEQ ID NO: 426 - protein, 19 aa, synthetic construct
PLNGAVHLYAQAQTGAVQN

SEQ ID NO: 427 - protein, 19 aa, synthetic construct
PLNGAVHLYAQAQVNSVQN

SEQ ID NO: 428 - protein, 19 aa, synthetic construct
PLNGAVHLYAQAQVAGVQN

SEQ ID NO: 429 - protein, 19 aa, synthetic construct
PLNGAVHLYAQAQIGSVQN

SEQ ID NO: 430 - protein, 19 aa, synthetic construct
PLDGAVHVYAQAQTGWVQN

SEQ ID NO: 431 - protein, 19 aa, synthetic construct
TLNGAVHLYAQAQTTPVQN

SEQ ID NO: 432 - protein, 19 aa, synthetic construct
PLNGAVHLYAQAQLGSVQN

SEQ ID NO: 433 - protein, 19 aa, synthetic construct
PLNGAVHLYAQAQVNGVQN

SEQ ID NO: 434 - protein, 19 aa, synthetic construct
QLNGAVHLYAQAQLSSVQN

SEQ ID NO: 435 - protein, 19 aa, synthetic construct
PLNGAVHLYAQAQLTAVQN

SEQ ID NO: 436 - protein, 19 aa, synthetic construct
PLNGAVHLYAQAQVQNVQN

SEQ ID NO: 437 - protein, 19 aa, synthetic construct
PLNGAVHLYAQAQTKSVQN

SEQ ID NO: 438 - protein, 19 aa, synthetic construct
PLNGAVHLYAQAQSVGVQN

SEQ ID NO: 439 - protein, 19 aa, synthetic construct
QLNGAVHLYAQAQLGPVQN

SEQ ID NO: 440 - protein, 19 aa, synthetic construct
PLNGAVHLYAQAQTAWVQT

SEQ ID NO: 441 - protein, 19 aa, synthetic construct
PLNGAVHLYAQAQNASVQN

SEQ ID NO: 442 - protein, 19 aa, synthetic construct
PLNGAVHLYAQAQTSAVQN

SEQ ID NO: 443 - protein, 19 aa, synthetic construct
ALNGAVHLYAQAQLAAVQN

SEQ ID NO: 444 - protein, 19 aa, synthetic construct
PLNGAVHLYDQAQVSPVQN

SEQ ID NO: 445 - protein, 19 aa, synthetic construct
PLNGAVHLYAQAQTMSVKN

SEQ ID NO: 446 - protein, 19 aa, synthetic construct
PLNGAVHLYAQAQTANVQN

SEQ ID NO: 447 - protein, 19 aa, synthetic construct
PLNGAVHLYAQAQTGWFQN

SEQ ID NO: 448 - protein, 19 aa, synthetic construct
PLNGNVHLYAQAQTGWVQN

SEQ ID NO: 449 - protein, 19 aa, synthetic construct
PLNGSVHLYAQAQTGWVQS

SEQ ID NO: 450 - protein, 19 aa, synthetic construct
PLNGAVHLYAQAQTGGVLN

SEQ ID NO: 451 - protein, 19 aa, synthetic construct
PLNGAVHLYAQAQLTSVQN

SEQ ID NO: 452 - protein, 19 aa, synthetic construct
PLNGAVHLYAQAQTGWVQT

SEQ ID NO: 453 - protein, 19 aa, synthetic construct
PLNGAVHLYAQAQRSQVQN

SEQ ID NO: 454 - protein, 19 aa, synthetic construct
PLNGAVHIYAQAQVSPVQN

SEQ ID NO: 455 - protein, 19 aa, synthetic construct
PLNGSVHLYAQAQTGWFQN

SEQ ID NO: 456 - protein, 19 aa, synthetic construct
PLNGAVHLYAQAQRIPVQN

SEQ ID NO: 457 - protein, 19 aa, synthetic construct
QLNGAVHLYAQAQLVPVQN

SEQ ID NO: 458 - protein, 19 aa, synthetic construct
PLNGAVHLYAQAQTGWVQD

SEQ ID NO: 459 - protein, 19 aa, synthetic construct
PLNGAVHLYAKAQVSSVQN

SEQ ID NO: 460 - protein, 19 aa, synthetic construct
PLNGAVHLYAQAQRVEVQN

SEQ ID NO: 461 - protein, 19 aa, synthetic construct
PLNGAVHLYAQAQVLPVQN

SEQ ID NO: 462 - protein, 19 aa, synthetic construct
PLNGSVHLYAQAQTGWVRN

SEQ ID NO: 463 - protein, 19 aa, synthetic construct
PLNGTVHLYAQAQSSPVQN

SEQ ID NO: 464 - protein, 19 aa, synthetic construct
PLNGAVHLYAQAQTGGVQK

SEQ ID NO: 465 - protein, 19 aa, synthetic construct
PLNGAVHLYAQAQSVAVQN

SEQ ID NO: 466 - protein, 19 aa, synthetic construct
QLNGAVHLYAQAQLSGVQN

SEQ ID NO: 467 - protein, 19 aa, synthetic construct
PLNGAVHLYAQAQLQQVQN

SEQ ID NO: 468 - protein, 19 aa, synthetic construct
PLNGAVHLYAQAQLSTVQN

SEQ ID NO: 469 - protein, 19 aa, synthetic construct
PLNGAVHLYAQAQSAAVQN

SEQ ID NO: 470 - protein, 19 aa, synthetic construct
SLNGAVHLYAQAQVSAVQN

SEQ ID NO: 471 - protein, 19 aa, synthetic construct
PLNGAVHLYAQAQRTSVQN

SEQ ID NO: 472 - protein, 19 aa, synthetic construct
PLNGAVHLYAQAQTQNVQN

SEQ ID NO: 473 - protein, 19 aa, synthetic construct
PLNGAVHLYAQAQVNAVQN

SEQ ID NO: 474 - protein, 19 aa, synthetic construct
PLNGAVHLYAQAQTVAVQT

SEQ ID NO: 475 - protein, 19 aa, synthetic construct
PLNGAVHLYAQAQLMSVQN

SEQ ID NO: 476 - protein, 19 aa, synthetic construct
PLNGAVHLYAQAQTGWVQN

SEQ ID NO: 477 - protein, 19 aa, synthetic construct
PLNGAVHLYAHAQTGWVQH

SEQ ID NO: 478 - protein, 19 aa, synthetic construct
PLNGAVHLYAQAQTGWVQH

SEQ ID NO: 479 - protein, 19 aa, synthetic construct
PLNGAVHHYAQAQTMSVQN

SEQ ID NO: 480 - protein, 19 aa, synthetic construct
PLNGAVHLYAQAQTGWVQS

SEQ ID NO: 481 - protein, 19 aa, synthetic construct
PLNGAVHLYDQAQTTPVQN

SEQ ID NO: 482 - protein, 19 aa, synthetic construct
PLNGAVHLYAQAQTMMVQN

SEQ ID NO: 483 - protein, 19 aa, synthetic construct
PLNGAVHLYAQAQTGGVQS

SEQ ID NO: 484 - protein, 19 aa, synthetic construct
PLNGAVNLYAQAQTSPVQN

SEQ ID NO: 485 - protein, 19 aa, synthetic construct
ALNGAVHLYAQAQTGLVQN

SEQ ID NO: 486 - protein, 19 aa, synthetic construct
ALNGAVHLYAQAQVATVQN

SEQ ID NO: 487 - protein, 19 aa, synthetic construct
PLNGAVHLYAQAQTGSFQN

SEQ ID NO: 488 - protein, 19 aa, synthetic construct
PLNGAVHLYAQAQRSVVQN

SEQ ID NO: 489 - protein, 19 aa, synthetic construct
PLNGAVHLYAQAQTGSVQK

SEQ ID NO: 490 - protein, 19 aa, synthetic construct
PLNGAVHLYAQAQTQLVQN

SEQ ID NO: 491 - protein, 19 aa, synthetic construct
PLNGAVHLYAQAQTGGVHN

SEQ ID NO: 492 - protein, 19 aa, synthetic construct
PLNGAVHLYAQAQRTPVQN

SEQ ID NO: 493 - protein, 19 aa, synthetic construct
PLNGAVHLYAQAQRQQVQN

SEQ ID NO: 494 - protein, 19 aa, synthetic construct
PLNGAVHLYAQAQTGSVRN

SEQ ID NO: 495 - protein, 19 aa, synthetic construct
PLNGAVHLYAQAQVQGVQN

SEQ ID NO: 496 - protein, 19 aa, synthetic construct
TLNGAVHLYAQAQVSPVQN

SEQ ID NO: 497 - protein, 19 aa, synthetic construct
PLNGAVHLYAQAQPGWVQT

SEQ ID NO: 498 - protein, 19 aa, synthetic construct
PLNGAVHLYAQAQSTQVQN

SEQ ID NO: 499 - protein, 19 aa, synthetic construct
PLNGSVHLYAQAQTGWVEN

SEQ ID NO: 500 - protein, 19 aa, synthetic construct
PLNGAVHLYAQAQQSPVQN

SEQ ID NO: 501 - protein, 19 aa, synthetic construct
PLNGAVHLYAQAQRYSVQN

SEQ ID NO: 502 - protein, 19 aa, synthetic construct
PLNGAVHLYAQAQTGWDQN

SEQ ID NO: 503 - protein, 19 aa, synthetic construct
PLNGAVHLYAQAQTQRVQN

SEQ ID NO: 504 - protein, 19 aa, synthetic construct
ALNGAVHLYAQAQTGWVRN

SEQ ID NO: 505 - protein, 19 aa, synthetic construct
PLNGAVHLYAQPQTGWVQN

SEQ ID NO: 506 - protein, 19 aa, synthetic construct
ALNGAVHLYAQAQVSGVQN

SEQ ID NO: 507 - protein, 19 aa, synthetic construct
PLNGAVHLYAQAQSAGVQN

SEQ ID NO: 508 - protein, 19 aa, synthetic construct
PLNGAVHLYAQAQSAPVQT

SEQ ID NO: 509 - protein, 19 aa, synthetic construct
PLNGAVHLYAQAQRQSVQN

SEQ ID NO: 510 - protein, 19 aa, synthetic construct
PLNGAVHLYAQAQSQPVQN

SEQ ID NO: 511 - protein, 19 aa, synthetic construct
PLNGAVHLYAQAQVASVKN

SEQ ID NO: 512 - protein, 19 aa, synthetic construct
PLNGAVHLYAQAQTAWVRN

SEQ ID NO: 513 - protein, 19 aa, synthetic construct
SLNGAVHLYAQAQTMQVQN

SEQ ID NO: 514 - protein, 19 aa, synthetic construct
PLNGAVNLYAQAQSSPVQN

SEQ ID NO: 515 - protein, 19 aa, synthetic construct
PLNGAVHLYAQAQTGGGQN

SEQ ID NO: 516 - protein, 19 aa, synthetic construct
PLNGAVHLYDQAQVASVQN

SEQ ID NO: 517 - protein, 19 aa, synthetic construct
PLNGAVHLYAQAQSTSVQN

SEQ ID NO: 518 - protein, 19 aa, synthetic construct
PLNGTVHLYAQAQTGWVQH

SEQ ID NO: 519 - protein, 19 aa, synthetic construct
QLNGAVHLYAQAQTSSVQN

SEQ ID NO: 520 - protein, 19 aa, synthetic construct
PLDGAVHLYAQAQTGWVHN

SEQ ID NO: 521 - protein, 19 aa, synthetic construct
PLNGTVHLYAQAQTGWVQK

SEQ ID NO: 522 - protein, 19 aa, synthetic construct
PLNGAVHLYAQAQVLGVQN

SEQ ID NO: 523 - protein, 19 aa, synthetic construct
PLNGAVHLYAQAQNQPVQN

SEQ ID NO: 524 - protein, 19 aa, synthetic construct
PLNGAVHLYAQAQLGTVQN

SEQ ID NO: 525 - protein, 19 aa, synthetic construct
PLNGAVHLYAQAQRAGVQN

SEQ ID NO: 526 - protein, 19 aa, synthetic construct
PVNGAVHLYAQAQTGLVQN

SEQ ID NO: 527 - protein, 19 aa, synthetic construct
PLNGGVHLYAQAQTGWVQH

SEQ ID NO: 528 - protein, 19 aa, synthetic construct
PLNGAVHLYAQAQTGRVQN

SEQ ID NO: 529 - protein, 19 aa, synthetic construct
PLNGAVHLYAQAQTGGVKN

SEQ ID NO: 530 - protein, 19 aa, synthetic construct
PLNGAVHLYAQAQTAWLQN

SEQ ID NO: 531 - protein, 19 aa, synthetic construct
PLNGAVHLYAQAQTRWVQK

SEQ ID NO: 532 - protein, 19 aa, synthetic construct
PLNGAVHLYAQAQLAPVKN

SEQ ID NO: 533 - protein, 19 aa, synthetic construct
PLNGAVHHYAQAQTSSVQN

SEQ ID NO: 534 - protein, 19 aa, synthetic construct
PLNGAVHLYAQAQTGSVQD

SEQ ID NO: 535 - protein, 19 aa, synthetic construct
PLNGAVHLYAQAQTGMVQN

SEQ ID NO: 536 - protein, 19 aa, synthetic construct
PLNGAVHLYAQAQLSNVQN

SEQ ID NO: 537 - protein, 19 aa, synthetic construct
PLNGAVHLYAQAQRLPVQN

SEQ ID NO: 538 - protein, 19 aa, synthetic construct
PLNGAVHLYAQAQRQGVQN

SEQ ID NO: 539 - protein, 19 aa, synthetic construct
PLNGAVHLYAQAQSTPVQT

SEQ ID NO: 540 - protein, 19 aa, synthetic construct
QLNGNVHLYAQAQTGWVQN

SEQ ID NO: 541 - protein, 19 aa, synthetic construct
PLNGGVHLYAQAQTGWVQT

SEQ ID NO: 542 - protein, 19 aa, synthetic construct
PLNGAVHLYAQAQTTPVKN

SEQ ID NO: 543 - protein, 19 aa, synthetic construct
PLNGAVHLYAQAQRLTVQN

SEQ ID NO: 544 - protein, 19 aa, synthetic construct
PLNGAVHLYAQAQTLRVQN

SEQ ID NO: 545 - protein, 19 aa, synthetic construct
PLNGAVHLYAQAQSAFVQN

SEQ ID NO: 546 - protein, 19 aa, synthetic construct
SLNGAVHLYAQAQTNSVQN

SEQ ID NO: 547 - protein, 19 aa, synthetic construct
PLNGAVHLYAQAQSVQVQN

SEQ ID NO: 548 - protein, 19 aa, synthetic construct
PLDGAVHLYAQAQTAAVQN

SEQ ID NO: 549 - protein, 19 aa, synthetic construct
SLNGAVHLYAQAQLMPVQN

SEQ ID NO: 550 - protein, 19 aa, synthetic construct
PLDGAVHLYAQAQTGWVQT

SEQ ID NO: 551 - protein, 19 aa, synthetic construct
PLNGAVHLYAQAQLLPVQN

SEQ ID NO: 552 - protein, 19 aa, synthetic construct
PLNGAVHLYAQAQRTQVQN

SEQ ID NO: 553 - protein, 19 aa, synthetic construct
PLNGAVHLYAQAQTGSDQN

SEQ ID NO: 554 - protein, 19 aa, synthetic construct
PLNGAVHLYAQAQVASDQN

SEQ ID NO: 555 - protein, 19 aa, synthetic construct
PLNGAVNLYAQAQLAPVQN

SEQ ID NO: 556 - protein, 19 aa, synthetic construct
PLNGSVHLYAQAQTGWLQN

SEQ ID NO: 557 - protein, 19 aa, synthetic construct
PLNGTVHLYAQAQTGWVQN

SEQ ID NO: 558 - protein, 19 aa, synthetic construct
PLNGAVHLYAQAQVSPVKN

SEQ ID NO: 559 - protein, 19 aa, synthetic construct
PLNGAVHLYAQAQLPPVQN

SEQ ID NO: 560 - protein, 19 aa, synthetic construct
PLNGAVHLYAQAQSSPVQT

SEQ ID NO: 561 - protein, 19 aa, synthetic construct
PLNGAVHLYAQAQAQPVQN

SEQ ID NO: 562 - protein, 19 aa, synthetic construct
PLNGDVHLYAQAQTTSVQN

SEQ ID NO: 563 - protein, 19 aa, synthetic construct
PLNGAVHLYAQAQTPQVQN

SEQ ID NO: 564 - protein, 19 aa, synthetic construct
PLNGAVHLYAQAQTSWVQN

SEQ ID NO: 565 - protein, 19 aa, synthetic construct
PLNGAVHLYAQAQTGGDQN

SEQ ID NO: 566 - protein, 19 aa, synthetic construct
PLNGAVHLYAQAQLSPVKN

SEQ ID NO: 567 - protein, 19 aa, synthetic construct
PLNGAVHLYAQAQSSPVKN

SEQ ID NO: 568 - protein, 19 aa, synthetic construct
PLNGAVHLYAQAQNTTVQN

SEQ ID NO: 569 - protein, 19 aa, synthetic construct
PLDGAVHLYAQAQTGWVQH

SEQ ID NO: 570 - protein, 19 aa, synthetic construct
PLNGAVHLYAQAQTTRVQN

SEQ ID NO: 571 - protein, 19 aa, synthetic construct
PLDGAVHLYAQAQTGWLQN

SEQ ID NO: 572 - protein, 19 aa, synthetic construct
PLNGSVHLYAQPQTGWVQN

SEQ ID NO: 573 - protein, 19 aa, synthetic construct
PLNGAVHLYSQAQTGLVQN

SEQ ID NO: 574 - protein, 19 aa, synthetic construct
PLNGAVHLYAQAQTQWVQN

SEQ ID NO: 575 - protein, 19 aa, synthetic construct
PLNGSVHLYAQAQTGWVQI

SEQ ID NO: 576 - protein, 19 aa, synthetic construct
PLNGAVHLYAQAQTGSVHN

SEQ ID NO: 577 - protein, 19 aa, synthetic construct
ALNGAVHLYAQAQTGWVQN

SEQ ID NO: 578 - protein, 19 aa, synthetic construct
PLNGTVHLYAQAQTGWVRN

SEQ ID NO: 579 - protein, 19 aa, synthetic construct
PLNGAVHLYAQAQTGGLQN

SEQ ID NO: 580 - protein, 19 aa, synthetic construct
SLNGAVHLYAQAQVSGVQN

SEQ ID NO: 581 - protein, 19 aa, synthetic construct
PLNGAVHLYAQAQTAWVQK

SEQ ID NO: 582 - protein, 19 aa, synthetic construct
PLNGAVHLYAQAQTGRVQT

SEQ ID NO: 583 - protein, 19 aa, synthetic construct
TLNGAVHLYAQAQSAPVQN

SEQ ID NO: 584 - protein, 19 aa, synthetic construct
PLNGAVHLYDQAQTVAVQN

SEQ ID NO: 585 - protein, 19 aa, synthetic construct
QLNGAVHLYAQAQTGSVQN

SEQ ID NO: 586 - protein, 19 aa, synthetic construct
PLNGAVHLYAQAQNTQVQN

SEQ ID NO: 587 - protein, 19 aa, synthetic construct
PLNGAVHLYAQAQTGWLQN

SEQ ID NO: 588 - protein, 19 aa, synthetic construct
PINGAVHLYAQAQTGLVQN

SEQ ID NO: 589 - protein, 19 aa, synthetic construct
PLDGAVHLYAQAQTGWVQI

SEQ ID NO: 590 - protein, 19 aa, synthetic construct
PLNGSVHLYAQAQTGSVQT

SEQ ID NO: 591 - protein, 19 aa, synthetic construct
PLNGAVQLYAQAQTSSVQN

SEQ ID NO: 592 - protein, 19 aa, synthetic construct
PLNGAVHLYAQAQTYAVQN

SEQ ID NO: 593 - protein, 19 aa, synthetic construct
PLNGAVHLYAQAQTLSVQN

SEQ ID NO: 594 - protein, 19 aa, synthetic construct
PLNGAVHLYAQAQNLPVQN

SEQ ID NO: 595 - protein, 19 aa, synthetic construct
PLNGAVHLYAQAQTSSDQN

SEQ ID NO: 596 - protein, 19 aa, synthetic construct
PLNGAVHLYAQAQATSVQN

SEQ ID NO: 597 - protein, 19 aa, synthetic construct
TLNGAVHLYAQAQLSPVQN

SEQ ID NO: 598 - protein, 19 aa, synthetic construct
PLNGAVHLYAQAQTAWFQN

SEQ ID NO: 599 - protein, 19 aa, synthetic construct
TLNGAVHLYAQAQVTPVQN

SEQ ID NO: 600 - protein, 19 aa, synthetic construct
TLNGAVHLYAQAQTAAVQN

SEQ ID NO: 601 - protein, 19 aa, synthetic construct
PLNGAVHLYAQAQATQVQN

SEQ ID NO: 602 - protein, 19 aa, synthetic construct
RLDGAVHLYAQAQTGWVQN

SEQ ID NO: 603 - protein, 19 aa, synthetic construct
QLNGAVHLYAQAQTGWVEN

SEQ ID NO: 604 - protein, 19 aa, synthetic construct
PLNGAVHLYAQAQVSSVKN

SEQ ID NO: 605 - protein, 19 aa, synthetic construct
PLNGAVHLYAQAQLSSVQN

SEQ ID NO: 606 - protein, 19 aa, synthetic construct
PLNGAVHLYAQAQTGSGQN

SEQ ID NO: 607 - protein, 19 aa, synthetic construct
PLNGAVHLYAQAQLQPVQT

SEQ ID NO: 608 - protein, 19 aa, synthetic construct
PINGAVHLYAQAQLSSVQN

SEQ ID NO: 609 - protein, 19 aa, synthetic construct
PINGAVHLYAQAQTVAVQN

SEQ ID NO: 610 - protein, 19 aa, synthetic construct
PLNGAVHLYAQAQVSAVKN

SEQ ID NO: 611 - protein, 19 aa, synthetic construct
SLNGAVHLYAQAQTVAVQN

SEQ ID NO: 612 - protein, 19 aa, synthetic construct
PLNGAVHLYAQAQTQAVQN

SEQ ID NO: 613 - protein, 19 aa, synthetic construct
QLNGAVHLYAQAQTAQVQN

SEQ ID NO: 614 - protein, 19 aa, synthetic construct
PLNGAVHLYDQAQTMSVQN

SEQ ID NO: 615 - protein, 19 aa, synthetic construct
PLNGAVHLYAQPQTGWVQK

SEQ ID NO: 616 - protein, 19 aa, synthetic construct
PLNGAVHLYAQAQVMPVQN

SEQ ID NO: 617 - protein, 19 aa, synthetic construct
PLNGAVHLYAQAQTVSVQK

SEQ ID NO: 618 - protein, 19 aa, synthetic construct
PLNGAVHLYAQAQTAWAQN

SEQ ID NO: 619 - protein, 19 aa, synthetic construct
PLNGAVHLYAQAQNALVQN

SEQ ID NO: 620 - protein, 19 aa, synthetic construct
TLNGAVHLYAQAQVSAVQN

SEQ ID NO: 621 - protein, 19 aa, synthetic construct
PLKGAVHLYAQAQTTPVQN

SEQ ID NO: 622 - protein, 19 aa, synthetic construct
QLNGSVHLYAQAQTGWVQN

SEQ ID NO: 623 - protein, 19 aa, synthetic construct
SLNGAVHLYAQAQVATVQN

SEQ ID NO: 624 - protein, 19 aa, synthetic construct
PLNGAVHLYAQAQRMLVQN

SEQ ID NO: 625 - protein, 19 aa, synthetic construct
PLNGAVHLYAQAQTVAVKN

SEQ ID NO: 626 - protein, 19 aa, synthetic construct
PLNGAVHLYDQAQTTSVQN

SEQ ID NO: 627 - protein, 19 aa, synthetic construct
PLNGAVHLYAQAQRQLVQN

SEQ ID NO: 628 - protein, 19 aa, synthetic construct
PLNGAVHLYAQAQTLGVQN

SEQ ID NO: 629 - protein, 19 aa, synthetic construct
PLNGAVHLYAQAQLGPVQT

SEQ ID NO: 630 - protein, 19 aa, synthetic construct
PLNGGVHLYAQAQTGWVQD

SEQ ID NO: 631 - protein, 19 aa, synthetic construct
PLNGAVHLYAQAQTGSVKN

SEQ ID NO: 632 - protein, 19 aa, synthetic construct
PLNGAVNLYAQAQLASVQN

SEQ ID NO: 633 - protein, 19 aa, synthetic construct
PLNGAVHLYDQAQVSSVQN

SEQ ID NO: 634 - protein, 19 aa, synthetic construct
PLNGAVHLYAQAQTMSDQN

SEQ ID NO: 635 - protein, 19 aa, synthetic construct
PLNGAVHLYAQAQTGWVQK

SEQ ID NO: 636 - protein, 19 aa, synthetic construct
PLNGAVHLYAQAQLASVKN

SEQ ID NO: 637 - protein, 19 aa, synthetic construct
PLNGGVHLYAQAQTGWGQN

SEQ ID NO: 638 - protein, 19 aa, synthetic construct
QLNGSVHLYAQAQTGWVQT

SEQ ID NO: 639 - protein, 19 aa, synthetic construct
QLNGAVHLYAQAQTTGVQN

SEQ ID NO: 640 - protein, 19 aa, synthetic construct
PLNGAVHLYAQAQTGFVQN

SEQ ID NO: 641 - protein, 19 aa, synthetic construct
PLNGAVHLYAQAQSALVQN

SEQ ID NO: 642 - protein, 19 aa, synthetic construct
ALNGAVHLYAQAQTGWDQN

SEQ ID NO: 643 - protein, 19 aa, synthetic construct
QLNGAVHLYAQAQISGVQN

SEQ ID NO: 644 - protein, 19 aa, synthetic construct
QLNGAVHLYAQAQRGSVQN

SEQ ID NO: 645 - protein, 19 aa, synthetic construct
PLNGAVHLYAQAQTGWVKT

SEQ ID NO: 646 - protein, 19 aa, synthetic construct
PLNGAVHLYAQAQSQLVQN

SEQ ID NO: 647 - protein, 19 aa, synthetic construct
PLNGSVHLYAQAQTGWGQN

SEQ ID NO: 648 - protein, 19 aa, synthetic construct
QLNGAVHLYAQAQTGWVPN

SEQ ID NO: 649 - protein, 19 aa, synthetic construct
PLNGAVHLYAKAQTGWVKN

SEQ ID NO: 650 - protein, 19 aa, synthetic construct
PLNGAVHLYAHAQTGWGQN

SEQ ID NO: 651 - protein, 19 aa, synthetic construct
ALNGAVHLYAQAQTGWVQH

SEQ ID NO: 652 - protein, 19 aa, synthetic construct
PLNGSVHLYAQAQIASVQN

SEQ ID NO: 653 - protein, 19 aa, synthetic construct
ALNGAVHLYAQAQTAMVQN

SEQ ID NO: 654 - protein, 19 aa, synthetic construct
TLNGAVHLYAQAQTMAVQN

SEQ ID NO: 655 - protein, 19 aa, synthetic construct
PHNGAVHLYAQAQVSSVQN

SEQ ID NO: 656 - protein, 19 aa, synthetic construct
PLNGAVQLYAQAQTAPVQN

SEQ ID NO: 657 - protein, 19 aa, synthetic construct
PLNGSVHLYAQAQKGSVQN

SEQ ID NO: 658 - protein, 19 aa, synthetic construct
PLNGAVHLYAQAQLSAVQN

SEQ ID NO: 659 - protein, 19 aa, synthetic construct
PINGAVHLYAQAQVSAVQN

SEQ ID NO: 660 - protein, 19 aa, synthetic construct
PLNGSVHLYAQAQTGLVQN

SEQ ID NO: 661 - protein, 19 aa, synthetic construct
PLNGAVHIYAQAQTGWFQN

SEQ ID NO: 662 - protein, 19 aa, synthetic construct
SLNGAVHLYAQAQIASVQN

SEQ ID NO: 663 - protein, 19 aa, synthetic construct
PLNGAVHLYAQEQTVSVQN

SEQ ID NO: 664 - protein, 19 aa, synthetic construct
PLNGAVHLYAQAQTMQVQT

SEQ ID NO: 665 - protein, 19 aa, synthetic construct
HLNGAVHLYAQAQTGWVQN

SEQ ID NO: 666 - protein, 19 aa, synthetic construct
PLNGAVHLYAQAQTGQVQN

SEQ ID NO: 667 - protein, 19 aa, synthetic construct
QLNGAVHLYAQAQTGWVQD

SEQ ID NO: 668 - protein, 19 aa, synthetic construct
PLNGAVHLYDQAQVAQVQN

SEQ ID NO: 669 - protein, 19 aa, synthetic construct
PLNGAVHLYAQAQTSPVKN

SEQ ID NO: 670 - protein, 19 aa, synthetic construct
PLNGAIHLYAQAQTSPVQN

SEQ ID NO: 671 - protein, 19 aa, synthetic construct
PLNGSVHLYAQAQTAMVQN

SEQ ID NO: 672 - protein, 19 aa, synthetic construct
PLNGAVHLYAQAQLSQVQT

SEQ ID NO: 673 - protein, 19 aa, synthetic construct
PLNGAVHLYAQAQTGSVLN

SEQ ID NO: 674 - protein, 19 aa, synthetic construct
PLNGAIHLYAQAQTASVQN

SEQ ID NO: 675 - protein, 19 aa, synthetic construct
PLNGAVHLYAQAQTNGVQN

SEQ ID NO: 676 - protein, 19 aa, synthetic construct
PLNGSVHLYAQAQTGWVQY

SEQ ID NO: 677 - protein, 19 aa, synthetic construct
PLNGALHLYAQAQTSPVQN

SEQ ID NO: 678 - protein, 19 aa, synthetic construct
ALNGAVHLYAQAQTGWVQT

SEQ ID NO: 679 - protein, 19 aa, synthetic construct
PLNGAVHLYAQAQTGWVKK

SEQ ID NO: 680 - protein, 19 aa, synthetic construct
QLNGAVHLYAQAQTGWVQN

SEQ ID NO: 681 - protein, 19 aa, synthetic construct
PLNGDVHLYAQAQTVAVQN

SEQ ID NO: 682 - protein, 19 aa, synthetic construct
PLNGGVHLYAQAQPGWVQN

SEQ ID NO: 683 - protein, 19 aa, synthetic construct
PLNGAVHLYAQAQAAAVQN

SEQ ID NO: 684 - protein, 19 aa, synthetic construct
PLNGAVHLYAQAQSAVVQN

SEQ ID NO: 685 - protein, 19 aa, synthetic construct
TLNGAVHLYAQAQRSSVQN

SEQ ID NO: 686 - protein, 19 aa, synthetic construct
PLNGAVHLYAQAQPGWVQH

SEQ ID NO: 687 - protein, 19 aa, synthetic construct
PLDGAVHLYAQAQTLSVQN

SEQ ID NO: 688 - protein, 19 aa, synthetic construct
PLNGAVHLYAQAQTASDQN

SEQ ID NO: 689 - protein, 19 aa, synthetic construct
PLNGAVHLYAQAQLSGVQN

SEQ ID NO: 690 - protein, 19 aa, synthetic construct
TLNGAVHLYAQAQTVAVQN

SEQ ID NO: 691 - protein, 19 aa, synthetic construct
PLNGAVHLYAQEQVASVQN

SEQ ID NO: 692 - protein, 19 aa, synthetic construct
PVNGAVHLYAQAQTGWAQN

SEQ ID NO: 693 - protein, 19 aa, synthetic construct
PLNGAVHLYAQAQSSRVQN

SEQ ID NO: 694 - protein, 19 aa, synthetic construct
PLNGSVHLYAQAQLGSVQN

SEQ ID NO: 695 - protein, 19 aa, synthetic construct
PLNGAVHLYAQAQSPPVQN

SEQ ID NO: 696 - protein, 19 aa, synthetic construct
PLNGAVHHYAQAQTTSVQN

SEQ ID NO: 697 - protein, 19 aa, synthetic construct
PLNGAVHLYDQAQSTPVQN

SEQ ID NO: 698 - protein, 19 aa, synthetic construct
QLNGAVHLYAQAQTGWVRN

SEQ ID NO: 699 - protein, 19 aa, synthetic construct
PLNGAVHLYAQAQVQPVQT

SEQ ID NO: 700 - protein, 19 aa, synthetic construct
PLNGAVHLYAQAQTSSVKN

SEQ ID NO: 701 - protein, 19 aa, synthetic construct
PLNGALHLYAQAQTASVQN

SEQ ID NO: 702 - protein, 19 aa, synthetic construct
PLNGAVHHYAQAQSAPVQN

SEQ ID NO: 703 - protein, 19 aa, synthetic construct
PLNGSVHLYAQAQTGWVHN

SEQ ID NO: 704 - protein, 19 aa, synthetic construct
PLNGAVHLYAQAQLSPLQN

SEQ ID NO: 705 - protein, 19 aa, synthetic construct
PLNGAVHLYAKAQVTPVQN

SEQ ID NO: 706 - protein, 19 aa, synthetic construct
PLNGAVNLYAQAQTQPVQN

SEQ ID NO: 707 - protein, 19 aa, synthetic construct
SLNGAVHLYAQAQTGLVQN

SEQ ID NO: 708 - protein, 19 aa, synthetic construct
PLDGSVHLYAQAQTGGVQN

SEQ ID NO: 709 - protein, 19 aa, synthetic construct
PLNGAVHLYDQAQTLPVQN

SEQ ID NO: 710 - protein, 19 aa, synthetic construct
PLNGAVHLYAQAQVSQVQK

SEQ ID NO: 711 - protein, 19 aa, synthetic construct
PLNGAVHLYAQAQLVGVQN

SEQ ID NO: 712 - protein, 19 aa, synthetic construct
PLNGAVHLYAQEQTSSVQN

SEQ ID NO: 713 - protein, 19 aa, synthetic construct
PLNGAVHIYAQAQTVAVQN

SEQ ID NO: 714 - protein, 19 aa, synthetic construct
PLNGAVNLYAQAQVTPVQN

SEQ ID NO: 715 - protein, 19 aa, synthetic construct
TLNGAVHLYAQAQTMSVQN

SEQ ID NO: 716 - protein, 19 aa, synthetic construct
TLNGAVHLYAQAQTLAVQN

SEQ ID NO: 717 - protein, 19 aa, synthetic construct
PINGAVHLYAQAQVAQVQN

SEQ ID NO: 718 - protein, 19 aa, synthetic construct
PLNGQVHLYAQAQTGWVQN

SEQ ID NO: 719 - protein, 19 aa, synthetic construct
QLNGAVHLYAQAQTGGVQN

SEQ ID NO: 720 - protein, 19 aa, synthetic construct
PLNGAVHLYAQAQTLSVKN

SEQ ID NO: 721 - protein, 19 aa, synthetic construct
PLNGTVHLYAQAQTGWDQN

SEQ ID NO: 722 - protein, 19 aa, synthetic construct
PLNGAVHLYAQAQTGWFQK

SEQ ID NO: 723 - protein, 19 aa, synthetic construct
ALNGAVHLYAQAQTSKVQN

SEQ ID NO: 724 - protein, 19 aa, synthetic construct
ALNGTVHLYAQAQTGWVQN

SEQ ID NO: 725 - protein, 19 aa, synthetic construct
PLNGAVPLYAQAQTGWVQH

SEQ ID NO: 726 - protein, 19 aa, synthetic construct
PLNGAVHLYAQAKTGWVQK

SEQ ID NO: 727 - protein, 19 aa, synthetic construct
PLNGAVHLYAQAQTPAVQN

SEQ ID NO: 728 - protein, 19 aa, synthetic construct
PLNGAVHLYAQAQTVGVKN

SEQ ID NO: 729 - protein, 19 aa, synthetic construct
PLNGAVHLYAQEQTGWFQN

SEQ ID NO: 730 - protein, 19 aa, synthetic construct
PLNGAVHLYAQAQKGWDQN

SEQ ID NO: 731 - protein, 19 aa, synthetic construct
PLNGAVHLYDQAQTSAVQN

SEQ ID NO: 732 - protein, 19 aa, synthetic construct
PLDGAVHLYAQAQTGWVQK

SEQ ID NO: 733 - protein, 19 aa, synthetic construct
PLNGAVHLYAQAQTAWVLN

SEQ ID NO: 734 - protein, 19 aa, synthetic construct
PLNGSVHLYAQAQTGWVLN

SEQ ID NO: 735 - protein, 19 aa, synthetic construct
QLNGAVHLYAQAQTGWVQT

SEQ ID NO: 736 - protein, 19 aa, synthetic construct
PLNGAVHLYAQAQVPPVQN

SEQ ID NO: 737 - protein, 19 aa, synthetic construct
PVNGAVHLYAQAQVQSVQN

SEQ ID NO: 738 - protein, 19 aa, synthetic construct
QLNGAVHLYAQAQTKSVQN

SEQ ID NO: 739 - protein, 19 aa, synthetic construct
PVNGAVHLYAQAQTSSVQN

SEQ ID NO: 740 - protein, 19 aa, synthetic construct
PLNGAVHLYAQAQATGVQN

SEQ ID NO: 741 - protein, 19 aa, synthetic construct
TLNGAVHLYAQAQLSQVQN

SEQ ID NO: 742 - protein, 19 aa, synthetic construct
PLDGAVHLYAQAQTVSVQN

SEQ ID NO: 743 - protein, 19 aa, synthetic construct
SLNGAVHLYAQAQTKPVQN

SEQ ID NO: 744 - protein, 19 aa, synthetic construct
PLKGAVHLYAQAQSAPVQN

SEQ ID NO: 745 - protein, 19 aa, synthetic construct
PLNGAVHLYAQAKTGWVKN

SEQ ID NO: 746 - protein, 19 aa, synthetic construct
PLNGSVHLYAQAQTLGVQN

SEQ ID NO: 747 - protein, 19 aa, synthetic construct
PLKGAVHLYAQAQLAPVQN

SEQ ID NO: 748 - protein, 19 aa, synthetic construct
PLNGSVHLYAQAQTGWVQK

SEQ ID NO: 749 - protein, 19 aa, synthetic construct
PLNGAVHLYAQAQTGGVQI

SEQ ID NO: 750 - protein, 19 aa, synthetic construct
PLNGAVHLYAQPQTGWVQT

SEQ ID NO: 751 - protein, 19 aa, synthetic construct
PLNGAVHLYAQAQTGWVLN

SEQ ID NO: 752 - protein, 19 aa, synthetic construct
PLNGAVHLYDQAQLTPVQN

SEQ ID NO: 753 - protein, 19 aa, synthetic construct
QLNGAVHLYAQAQTATVQN

SEQ ID NO: 754 - protein, 19 aa, synthetic construct
PLNGAVHLYAQAQTAWGQN

SEQ ID NO: 755 - protein, 19 aa, synthetic construct
PLNGAVHLYAQAQTGWVHN

SEQ ID NO: 756 - protein, 19 aa, synthetic construct
PLKGAVHLYAQAQSSPVQN

SEQ ID NO: 757 - protein, 19 aa, synthetic construct
PLNGAVHLYAQAQLGSVQT

SEQ ID NO: 758 - protein, 19 aa, synthetic construct
PLNGAVHLYAQAQSANVQN

SEQ ID NO: 759 - protein, 19 aa, synthetic construct
PLNGGVHLYAQAQTGSVQN

SEQ ID NO: 760 - protein, 19 aa, synthetic construct
PLNGAVHLYDQAQRSSVQN

SEQ ID NO: 761 - protein, 19 aa, synthetic construct
PLNGAVHLYAQAQTGGVQD

SEQ ID NO: 762 - protein, 19 aa, synthetic construct
PLNGAVHLYAQAQTMAVKN

SEQ ID NO: 763 - protein, 19 aa, synthetic construct
PLNGAVHLYAQAQTASVKN

SEQ ID NO: 764 - protein, 19 aa, synthetic construct
PLNGAVHLYAQAQSSPVQK

SEQ ID NO: 765 - protein, 19 aa, synthetic construct
PLNGAVHLYAQAQTGWVKN

SEQ ID NO: 766 - protein, 19 aa, synthetic construct
ALNGAVHLYAQAQTGGVQN

SEQ ID NO: 767 - protein, 19 aa, synthetic construct
PLNGAVHLYAQAQTGTVQT

SEQ ID NO: 768 - protein, 19 aa, synthetic construct
PLNGAVHLYAQAQTGWVQI

SEQ ID NO: 769 - protein, 19 aa, synthetic construct
PINGAVHLYAQAQTSLVQN

SEQ ID NO: 770 - protein, 19 aa, synthetic construct
PLNGAVHIYAQAQVAQVQN

SEQ ID NO: 771 - protein, 19 aa, synthetic construct
PLNGAVHLYAQAQTVWVKN

SEQ ID NO: 772 - protein, 19 aa, synthetic construct
TLNGAVHLYAQAQLMPVQN

SEQ ID NO: 773 - protein, 19 aa, synthetic construct
PLNGAVHIYAQAQTAPVQN

SEQ ID NO: 774 - protein, 19 aa, synthetic construct
PLYGAVHLYAQAQTASVQN

SEQ ID NO: 775 - protein, 19 aa, synthetic construct
TLNGAVHLYAQAQLGPVQN

SEQ ID NO: 776 - protein, 19 aa, synthetic construct
PLDGAVHLYAQAQTGWVKN

SEQ ID NO: 777 - protein, 19 aa, synthetic construct
PLKGAVHLYAQAQVSPVQN

SEQ ID NO: 778 - protein, 19 aa, synthetic construct
PLNGAVHLYAQAQSQQVQN

SEQ ID NO: 779 - protein, 19 aa, synthetic construct
PLNGAVDLYAQAQLSPVQN

SEQ ID NO: 780 - protein, 19 aa, synthetic construct
PLNGAVHLYAQAQVGSVQT

SEQ ID NO: 781 - protein, 19 aa, synthetic construct
PLNGTVHLYAQAQTGWAQN

SEQ ID NO: 782 - protein, 19 aa, synthetic construct
ALNGAVHLYAQAQTGLVQT

SEQ ID NO: 783 - protein, 19 aa, synthetic construct
PLNGAVHLYAQAQSSMVQN

SEQ ID NO: 784 - protein, 19 aa, synthetic construct
PLNGAVHLYAKAQTAGVQN

SEQ ID NO: 785 - protein, 19 aa, synthetic construct
PLNGAVHLYAHAQTGWVQK

SEQ ID NO: 786 - protein, 19 aa, synthetic construct
PLNGAVHLYAQAQTSPVQK

SEQ ID NO: 787 - protein, 19 aa, synthetic construct
PLNGAVHLYAQAQAVGVQN

SEQ ID NO: 788 - protein, 19 aa, synthetic construct
PLNGAVPLYAQAQTGWGQN

SEQ ID NO: 789 - protein, 19 aa, synthetic construct
PLNGTVHLYAQAQLGSVQN

SEQ ID NO: 790 - protein, 19 aa, synthetic construct
QLNGAVHLYAQAQTGWVQH

SEQ ID NO: 791 - protein, 19 aa, synthetic construct
PLNGSVHLYAQAQTGWVKN

SEQ ID NO: 792 - protein, 19 aa, synthetic construct
PLNGAVHLYDQAQVAPVQN

SEQ ID NO: 793 - protein, 19 aa, synthetic construct
PLNGAVNLYAQAQVSSVQN

SEQ ID NO: 794 - protein, 19 aa, synthetic construct
PLNGAVHLYAQAQTLPVQK

SEQ ID NO: 795 - protein, 19 aa, synthetic construct
PLNGSVHLYAQAQTASVQN

SEQ ID NO: 796 - protein, 19 aa, synthetic construct
ALNGAVHLYAQAQTGWGQN

SEQ ID NO: 797 - protein, 19 aa, synthetic construct
PLNGAVHLYAQAQTGWGQN

SEQ ID NO: 798 - protein, 19 aa, synthetic construct
PLNGAAHLYAQAQTSPVQN

SEQ ID NO: 799 - protein, 19 aa, synthetic construct
PLNGAVHLYAQAQTGRVQH

SEQ ID NO: 800 - protein, 19 aa, synthetic construct
PINGAVHLYAQAQTGWVQS

SEQ ID NO: 801 - protein, 19 aa, synthetic construct
PLNGAVHLYAQAQTPSVQN

SEQ ID NO: 802 - protein, 19 aa, synthetic construct
PLNGAVHLYDQAQTTAVQN

SEQ ID NO: 803 - protein, 19 aa, synthetic construct
PLNGNVHLYAQAQTGWVQK

SEQ ID NO: 804 - protein, 19 aa, synthetic construct
PLNGAVHLYAQAQTGWVEN

SEQ ID NO: 805 - protein, 19 aa, synthetic construct
PLNGAVNLYAQAQTTPVQN

SEQ ID NO: 806 - protein, 19 aa, synthetic construct
PLNGAVNLYAQAQLSQVQN

SEQ ID NO: 807 - protein, 19 aa, synthetic construct
SLNGAVHLYAQAQVMSVQN

SEQ ID NO: 808 - protein, 19 aa, synthetic construct
QLNGAVHLYAQAQTGWVQS

SEQ ID NO: 809 - protein, 19 aa, synthetic construct
PINGAVHLYAQAQTGWFQN

SEQ ID NO: 810 - protein, 19 aa, synthetic construct
PLNGDVHLYAQAQVSSVQN

SEQ ID NO: 811 - protein, 19 aa, synthetic construct
PLNGGVHLYAQAQTGWVQS

SEQ ID NO: 812 - protein, 19 aa, synthetic construct
PLNGAVNLYAQAQRSTVQN

SEQ ID NO: 813 - protein, 19 aa, synthetic construct
ALNGAVHLYAQAQTGWVQY

SEQ ID NO: 814 - protein, 19 aa, synthetic construct
PLNGAVHHYAQAQTAAVQN

SEQ ID NO: 815 - protein, 19 aa, synthetic construct
PLNGAVHRYAQAQTGWVQH

SEQ ID NO: 816 - protein, 19 aa, synthetic construct
QLNGAVHLYAQAQTGWVHN

SEQ ID NO: 817 - protein, 19 aa, synthetic construct
PLNGAVHLYAQAQRGWVQN

SEQ ID NO: 818 - protein, 19 aa, synthetic construct
PLNGAVHLYAQAQTGSVEN

SEQ ID NO: 819 - protein, 19 aa, synthetic construct
ALNGAVHLYAQAQTGWVHN

SEQ ID NO: 820 - protein, 19 aa, synthetic construct
PLNGAVNLYAQAQTLAVQN

SEQ ID NO: 821 - protein, 19 aa, synthetic construct
PLNGAVHLYAQAQSSLVQN

SEQ ID NO: 822 - protein, 19 aa, synthetic construct
ALNGAVHLYAQAQTGWLQN

SEQ ID NO: 823 - protein, 19 aa, synthetic construct
TLNGAVHLYAQAQTLQVQN

SEQ ID NO: 824 - protein, 19 aa, synthetic construct
PLNGAVHLYDQAQVQSVQN

SEQ ID NO: 825 - protein, 19 aa, synthetic construct
SLNGAVHLYAQAQVTGVQN

SEQ ID NO: 826 - protein, 19 aa, synthetic construct
QLNGAVHLYAQAQSAVVQN

SEQ ID NO: 827 - protein, 19 aa, synthetic construct
PLNGVVHLYAQAQTGWVQT

SEQ ID NO: 828 - protein, 19 aa, synthetic construct
PLNGAVHLYAQAQTAWVKN

SEQ ID NO: 829 - protein, 19 aa, synthetic construct
TLNGAVHLYAQAQTLPVQN

SEQ ID NO: 830 - protein, 19 aa, synthetic construct
ALNGAVHLYAQAQTTGVQN

SEQ ID NO: 831 - protein, 19 aa, synthetic construct
PLNGAVHLYAKAQTMAVQN

SEQ ID NO: 832 - protein, 19 aa, synthetic construct
PLNGAVHLYAQAQTYSVQN

SEQ ID NO: 833 - protein, 19 aa, synthetic construct
PLNGCVHLYAQAQTGWVQN

SEQ ID NO: 834 - protein, 19 aa, synthetic construct
PLNGAVHLYAQAQLAAVQT

SEQ ID NO: 835 - protein, 19 aa, synthetic construct
PLNGAVHLYAQAQTALVKN

SEQ ID NO: 836 - protein, 19 aa, synthetic construct
PLNGAVHLYAKAQTVAVQN

SEQ ID NO: 837 - protein, 19 aa, synthetic construct
PLNGAVHLYAHAQTGWVQT

SEQ ID NO: 838 - protein, 19 aa, synthetic construct
PLNGGVHLYAQAQRGSVQN

SEQ ID NO: 839 - protein, 19 aa, synthetic construct
PLNGAFHLYAQAQTGGVQN

SEQ ID NO: 840 - protein, 19 aa, synthetic construct
PLNGAVHLYALAQTSPVQN

SEQ ID NO: 841 - protein, 19 aa, synthetic construct
PLNGAVHLYAQAQTGWVQY

SEQ ID NO: 842 - protein, 19 aa, synthetic construct
PLNGAVHLYAQAQTLPVQT

SEQ ID NO: 843 - protein, 19 aa, synthetic construct
PLNGAVHLYSQAQTGWFQN

SEQ ID NO: 844 - protein, 19 aa, synthetic construct
PLNGAVHLYAQAQTGLVQH

SEQ ID NO: 845 - protein, 19 aa, synthetic construct
PLNGAVHLYAQAQTPTVQN

SEQ ID NO: 846 - protein, 19 aa, synthetic construct
PLYGAVHLYAQAQTAWVQN

SEQ ID NO: 847 - protein, 19 aa, synthetic construct
PLNGAVHLYAKAQTASVQN

SEQ ID NO: 848 - protein, 19 aa, synthetic construct
PLNGAVHLYAQAQTASVQK

SEQ ID NO: 849 - protein, 19 aa, synthetic construct
PLDGSVHLYAQAQTAWVQN

SEQ ID NO: 850 - protein, 19 aa, synthetic construct
PLNGADHLYAQAQTSSVQN

SEQ ID NO: 851 - protein, 19 aa, synthetic construct
PLNGAVHLYAQAQTSPVQI

SEQ ID NO: 852 - protein, 19 aa, synthetic construct
PLNGAVHLYAQAQIGWVQN

SEQ ID NO: 853 - protein, 19 aa, synthetic construct
PLNGAVHLYAKAQTSTVQN

SEQ ID NO: 854 - protein, 19 aa, synthetic construct
PLNGAVHRYAQAQTGWVQT

SEQ ID NO: 855 - protein, 19 aa, synthetic construct
PLNGAVHLYDQAQTSTVQN

SEQ ID NO: 856 - protein, 19 aa, synthetic construct
QLNGAVHLYAQAQTGLVQN

SEQ ID NO: 857 - protein, 19 aa, synthetic construct
PLNGAVNLYAQAQLGPVQN

SEQ ID NO: 858 - protein, 19 aa, synthetic construct
PLNGAVHLYAQAQTGWDKN

SEQ ID NO: 859 - protein, 19 aa, synthetic construct
PLNGALHLYAQAQTGWVKN

SEQ ID NO: 860 - protein, 19 aa, synthetic construct
PLNGNVHLYAHAQTGWVQN

SEQ ID NO: 861 - protein, 19 aa, synthetic construct
PLNGAVHLYAQAQKSSVQN

SEQ ID NO: 862 - protein, 19 aa, synthetic construct
PLNGAVHLYAQAQTGYVQN

SEQ ID NO: 863 - protein, 19 aa, synthetic construct
PVNGAVHLYAQAQVGSVQN

SEQ ID NO: 864 - protein, 19 aa, synthetic construct
PLNGGVHLYAQAQTGWVKN

SEQ ID NO: 865 - protein, 19 aa, synthetic construct
PLNGAVHLYAQAQRGWVQT

SEQ ID NO: 866 - protein, 19 aa, synthetic construct
PLNGAVNLYAQAQRSLVQN

SEQ ID NO: 867 - protein, 19 aa, synthetic construct
PINGAVHLYAQAQTGWDQN

SEQ ID NO: 868 - protein, 19 aa, synthetic construct
PLNGNVHLYAQAQTGWVQT

SEQ ID NO: 869 - protein, 19 aa, synthetic construct
PLNGAVHLYAKAQTGWFQN

SEQ ID NO: 870 - protein, 19 aa, synthetic construct
PLNGAVHLYAQEQTSTVQN

SEQ ID NO: 871 - protein, 19 aa, synthetic construct
PLNGAVHLYAQAQTGGVEN

SEQ ID NO: 872 - protein, 19 aa, synthetic construct
PLNGAVHLYSQAQTGWVQI

SEQ ID NO: 873 - protein, 19 aa, synthetic construct
SLNGAVHLYAQAQTGLVQK

SEQ ID NO: 874 - protein, 19 aa, synthetic construct
PLNGAVHLYAQAQTGCVRN

SEQ ID NO: 875 - protein, 19 aa, synthetic construct
PLNGADHLYAQAQVTPVQN

SEQ ID NO: 876 - protein, 19 aa, synthetic construct
PLNGAVHLYAPAQTGWVQT

SEQ ID NO: 877 - protein, 19 aa, synthetic construct
PLNGDVHLYAQAQTSAVQN

SEQ ID NO: 878 - protein, 19 aa, synthetic construct
TLNGAVHLYAQAQSSLVQN

SEQ ID NO: 879 - protein, 19 aa, synthetic construct
SLNGAVHLYAQAQRSVVQN

SEQ ID NO: 880 - protein, 19 aa, synthetic construct
SLNGAVHLYAQAQTGWVQS

SEQ ID NO: 881 - protein, 19 aa, synthetic construct
PVNGAVHLYAQAQTGWVQS

SEQ ID NO: 882 - protein, 19 aa, synthetic construct
PLNGAVHLYAQAQLSPVQS

SEQ ID NO: 883 - protein, 19 aa, synthetic construct
PLNGAVHLYAQPQTGWLQN

SEQ ID NO: 884 - protein, 19 aa, synthetic construct
PLNGAVNLYAQAQSAPVQN

SEQ ID NO: 885 - protein, 19 aa, synthetic construct
PLNGTVHLYAQAQTGWVPN

SEQ ID NO: 886 - protein, 19 aa, synthetic construct
PVDGAVHLYAQAQTGSVQN

SEQ ID NO: 887 - protein, 19 aa, synthetic construct
PLNGAVHLYDQAQTAAVQN

SEQ ID NO: 888 - protein, 19 aa, synthetic construct
PLKGAVHLYAQAQTSTVQN

SEQ ID NO: 889 - protein, 19 aa, synthetic construct
PLNGAVHLYAQAQTGPVQT

SEQ ID NO: 890 - protein, 19 aa, synthetic construct
PLNGAVHLYAQAQTVGVQK

SEQ ID NO: 891 - protein, 19 aa, synthetic construct
PLNGAVNLYAQAQTSTVQN

SEQ ID NO: 892 - protein, 19 aa, synthetic construct
PLNGAVHLYARAQTVSVQN

SEQ ID NO: 893 - protein, 19 aa, synthetic construct
PLNGAVHLYAQAQTASGQN

SEQ ID NO: 894 - protein, 19 aa, synthetic construct
PLNGAVHLYAQAQSVSVQN

SEQ ID NO: 895 - protein, 19 aa, synthetic construct
PLNGAVHLYAQAQSGPVQT

SEQ ID NO: 896 - protein, 19 aa, synthetic construct
QLNGAVHLYAQAQTGWGQN

SEQ ID NO: 897 - protein, 19 aa, synthetic construct
PLNGAVHLYAQAQVMSVKN

SEQ ID NO: 898 - protein, 19 aa, synthetic construct
PLNGTVHLYAKAQTGSVQN

SEQ ID NO: 899 - protein, 19 aa, synthetic construct
PLNGAVNLYAQAQTSLVQN

SEQ ID NO: 900 - protein, 19 aa, synthetic construct
PINGAVHLYAQAQTLSVQN

SEQ ID NO: 901 - protein, 19 aa, synthetic construct
PLNGAVHLYAQAQLGSVQK

SEQ ID NO: 902 - protein, 19 aa, synthetic construct
TLNGAVHLYAQAQTAMVQN

SEQ ID NO: 903 - protein, 19 aa, synthetic construct
PLNGAVHLYAQAHLSSVQN

SEQ ID NO: 904 - protein, 19 aa, synthetic construct
PLNGAVHLYAKAQVMSVQN

SEQ ID NO: 905 - protein, 19 aa, synthetic construct
PLNGAVHLYAQAQTGLVLN

SEQ ID NO: 906 - protein, 19 aa, synthetic construct
PLNGGVHLYAQAQTGWVQK

SEQ ID NO: 907 - protein, 19 aa, synthetic construct
PLNGAVHLYAKAQTGWVQK

SEQ ID NO: 908 - protein, 19 aa, synthetic construct
PLNGAVLLYAQAQTASVQN

SEQ ID NO: 909 - protein, 19 aa, synthetic construct
PLNGDVHLYAQAQTMAVQN

SEQ ID NO: 910 - protein, 19 aa, synthetic construct
PLNGAVHLYAKAQTAAVQN

SEQ ID NO: 911 - protein, 19 aa, synthetic construct
PLNGAVHLYAQAQTGLVQN

SEQ ID NO: 912 - protein, 19 aa, synthetic construct
PLNGDVHLYAQAQSSPVQN

SEQ ID NO: 913 - protein, 19 aa, synthetic construct
PLNGAVHLYAQAQTSNVQN

SEQ ID NO: 914 - protein, 19 aa, synthetic construct
ALDGAVHLYAQAQTGSVQN

SEQ ID NO: 915 - protein, 19 aa, synthetic construct
PLNGAVHLYSQAQTSSVQN

SEQ ID NO: 916 - protein, 19 aa, synthetic construct
PLKGAVHLYAQAQLSPVQN

SEQ ID NO: 917 - protein, 19 aa, synthetic construct
LLNGAVHLYAQAQTVSVQN

SEQ ID NO: 918 - protein, 19 aa, synthetic construct
PLNGGVHLYAQAQTGWVQI

SEQ ID NO: 919 - protein, 19 aa, synthetic construct
PLNGAVHLYSQAQTGWVRN

SEQ ID NO: 920 - protein, 19 aa, synthetic construct
PLNGAVHLYAQAQTGWGHN

SEQ ID NO: 921 - protein, 19 aa, synthetic construct
PHNGAVHLYAQAQTTSVQN

SEQ ID NO: 922 - protein, 19 aa, synthetic construct
PLNRAVHLYAQAQTGWVQK

SEQ ID NO: 923 - protein, 19 aa, synthetic construct
PLNGAVHLYDQAQRASVQN

SEQ ID NO: 924 - protein, 19 aa, synthetic construct
PLNGAVHLYSQAQTGWVQN

SEQ ID NO: 925 - protein, 19 aa, synthetic construct
PLNGSVHLYAQAQTGTVQN

SEQ ID NO: 926 - protein, 19 aa, synthetic construct
PLNGAVHLYDQAQTSGVQN

SEQ ID NO: 927 - protein, 19 aa, synthetic construct
PLNGAVHLYAQAKTGWFQN

SEQ ID NO: 928 - protein, 19 aa, synthetic construct
KLDGAVHLYAQAQTGLVQN

SEQ ID NO: 929 - protein, 19 aa, synthetic construct
PLNGAVHLYAQAQSQMVQN

SEQ ID NO: 930 - protein, 19 aa, synthetic construct
TLNGAVHLYAQAQTSVVQN

SEQ ID NO: 931 - protein, 19 aa, synthetic construct
PLNGAVHLYAKAQTGTVQN

SEQ ID NO: 932 - protein, 19 aa, synthetic construct
PLNGAVHLYAQAQTVSVHN

SEQ ID NO: 933 - protein, 19 aa, synthetic construct
PLNGAVHLYAQAQLSSVQT

SEQ ID NO: 934 - protein, 19 aa, synthetic construct
PVNGAVHLYAQAQTGWFQN

SEQ ID NO: 935 - protein, 19 aa, synthetic construct
PLNGAVHLYAQAQTASVRN

SEQ ID NO: 936 - protein, 19 aa, synthetic construct
PLNGDVHLYAQAQTSTVQN

SEQ ID NO: 937 - protein, 19 aa, synthetic construct
PLNGAVHLYAKAQLGSVQN

SEQ ID NO: 938 - protein, 19 aa, synthetic construct
PINGAVHLYAQAQLVPVQN

SEQ ID NO: 939 - protein, 19 aa, synthetic construct
PLNGAVHHYAQAQLGPVQN

SEQ ID NO: 940 - protein, 19 aa, synthetic construct
PLNGAVHLYAPAQTGWVQH

SEQ ID NO: 941 - protein, 19 aa, synthetic construct
PLNGAVHLYAQAQVPAVQN

SEQ ID NO: 942 - protein, 19 aa, synthetic construct
PLNGAVNLYAQAQRLSVQN

SEQ ID NO: 943 - protein, 19 aa, synthetic construct
PLNGAVHLYAQAQTGRVQK

SEQ ID NO: 944 - protein, 19 aa, synthetic construct
PLNGAVLLYAQAQTVSVQN

SEQ ID NO: 945 - protein, 19 aa, synthetic construct
PLNGAVHLYAQAQAMSVQN

SEQ ID NO: 946 - protein, 19 aa, synthetic construct
PLNGAVHLYAQAQTAWVHN

SEQ ID NO: 947 - protein, 19 aa, synthetic construct
PLNGAVHLYAQPQTGWVRN

SEQ ID NO: 948 - protein, 19 aa, synthetic construct
PLNGAVHLYAQEQTGWLQN

SEQ ID NO: 949 - protein, 19 aa, synthetic construct
PLNGAVHLYAKAQTSAVQN

SEQ ID NO: 950 - protein, 19 aa, synthetic construct
PLNGSVHLYAQAQTVWVQN

SEQ ID NO: 951 - protein, 19 aa, synthetic construct
PLNGTVHLYAQAQTGWFQN

SEQ ID NO: 952 - protein, 19 aa, synthetic construct
PLNGAVNLYAQAQVASVQN

SEQ ID NO: 953 - protein, 19 aa, synthetic construct
PLNGAVHLYAQAQTGLVRN

SEQ ID NO: 954 - protein, 19 aa, synthetic construct
PLNGAVNLYAQAQLSTVQN

SEQ ID NO: 955 - protein, 19 aa, synthetic construct
PLNGAVHLYAKAQTQPVQN

SEQ ID NO: 956 - protein, 19 aa, synthetic construct
PLNGTVHLYAQAQTGWGQN

SEQ ID NO: 957 - protein, 19 aa, synthetic construct
PLNGAVHLYAQAQRTLVQT

SEQ ID NO: 958 - protein, 19 aa, synthetic construct
PLNGAVHLYAQAQTGSIQN

SEQ ID NO: 959 - protein, 19 aa, synthetic construct
QLNGAVHLYAQAQTGWDQN

SEQ ID NO: 960 - protein, 19 aa, synthetic construct
PLNGAVHLYAQAQLSSVKN

SEQ ID NO: 961 - protein, 19 aa, synthetic construct
QLNGAVHLYAQAQTVSVQN

SEQ ID NO: 962 - protein, 19 aa, synthetic construct
PLNGAVHLYAQAQTLQVQK

SEQ ID NO: 963 - protein, 19 aa, synthetic construct
TLNGAVHLYAQAQVLPVQN

SEQ ID NO: 964 - protein, 19 aa, synthetic construct
PLNGAVHLYAQAQVGSVKN

SEQ ID NO: 965 - protein, 19 aa, synthetic construct
PLNGAVHLYAQAQLAPLQN

SEQ ID NO: 966 - protein, 19 aa, synthetic construct
QLNGAVHLYAQAQTGSVKN

SEQ ID NO: 967 - protein, 19 aa, synthetic construct
PLNGAVHHYAQAQRSTVQN

SEQ ID NO: 968 - protein, 19 aa, synthetic construct
QLNGSVHLYAQAQTGRVQN

SEQ ID NO: 969 - protein, 19 aa, synthetic construct
TLNGAVHLYAQAQVKPVQN

SEQ ID NO: 970 - protein, 19 aa, synthetic construct
PLNGTVHLYAQAQTGLVQN

SEQ ID NO: 971 - protein, 19 aa, synthetic construct
PLNGAVHLYAQAQTPGVQN

SEQ ID NO: 972 - protein, 19 aa, synthetic construct
PINGAVHLYAQAQTSSVQN

SEQ ID NO: 973 - protein, 19 aa, synthetic construct
PLNGAVHLYAQAQLSAVQT

SEQ ID NO: 974 - protein, 19 aa, synthetic construct
PLNGAVHLYSQAQTGWDQN

SEQ ID NO: 975 - protein, 19 aa, synthetic construct
PLNCAVHLYAQAQTGWVQN

SEQ ID NO: 976 - protein, 19 aa, synthetic construct
PLNGAVNLYAQAQTMPVQN

SEQ ID NO: 977 - protein, 19 aa, synthetic construct
PLNGAVHLYSQAQTVAVQN

SEQ ID NO: 978 - protein, 19 aa, synthetic construct
PLNGTVHLYAQAQTGWVKN

SEQ ID NO: 979 - protein, 19 aa, synthetic construct
PLNGGVHLYAQAQTGWVHN

SEQ ID NO: 980 - protein, 19 aa, synthetic construct
QLNGAVHLYAQAQTGWVQK

SEQ ID NO: 981 - protein, 19 aa, synthetic construct
PLNGAVQLYAQAQTLAVQN

SEQ ID NO: 982 - protein, 19 aa, synthetic construct
PLNGTVHLYAQAQVGSVQN

SEQ ID NO: 983 - protein, 19 aa, synthetic construct
PLNGGVHLYAQAQTGGVQN

SEQ ID NO: 984 - protein, 19 aa, synthetic construct
PLKGAVHLYAQAQVSQVQN

SEQ ID NO: 985 - protein, 19 aa, synthetic construct
PLNGAVHHYAQAQTQPVQN

SEQ ID NO: 986 - protein, 19 aa, synthetic construct
PLNGAVHLYAQAPTGWVQT

SEQ ID NO: 987 - protein, 19 aa, synthetic construct
PLNGAVNLYAQAQTMSVQN

SEQ ID NO: 988 - protein, 19 aa, synthetic construct
PLNGAVHLYAQAQTGVVQN

SEQ ID NO: 989 - protein, 19 aa, synthetic construct
PLNGAVHLYAQAQVPQVQN

SEQ ID NO: 990 - protein, 19 aa, synthetic construct
PHNGAVHLYAQAQTMSVQN

SEQ ID NO: 991 - protein, 19 aa, synthetic construct
QLNGAVHLYAQAQTGWLQN

SEQ ID NO: 992 - protein, 19 aa, synthetic construct
PLNGAVHLYAQAQTGCVQK

SEQ ID NO: 993 - protein, 19 aa, synthetic construct
SLNGAVHLYAQAQTSLVQN

SEQ ID NO: 994 - protein, 19 aa, synthetic construct
PLNGAVHLYAQAQTRWVQT

SEQ ID NO: 995 - protein, 19 aa, synthetic construct
TLNGAVHLYAQAQTVQVQN

SEQ ID NO: 996 - protein, 19 aa, synthetic construct
ALNGAVHLYAQAQKGGVQN

SEQ ID NO: 997 - protein, 19 aa, synthetic construct
PLNGAVHLYDQAQVSGVQN

SEQ ID NO: 998 - protein, 19 aa, synthetic construct
PLNGAVHLYAQAQTGLDQN

SEQ ID NO: 999 - protein, 19 aa, synthetic construct
PLNGAVPLYAQAQTGWVQT

SEQ ID NO: 1000 - protein, 19 aa, synthetic construct
PLNGAVHLYAQAQVSSVHN

SEQ ID NO: 1001 - protein, 19 aa, synthetic construct
TLNGAVHLYAQAQTNSVQN

SEQ ID NO: 1002 - protein, 19 aa, synthetic construct
PLNGAGHLYAQAQLSPVQN

SEQ ID NO: 1003 - protein, 19 aa, synthetic construct
HLNGAVHLYAQAQTGRVQN

SEQ ID NO: 1004 - protein, 19 aa, synthetic construct
PLNGAVHLYDQAQTAMVQN

SEQ ID NO: 1005 - protein, 19 aa, synthetic construct
PINGAVHLYAQAQTGWVQH

SEQ ID NO: 1006 - protein, 19 aa, synthetic construct
PLNGAVQLYAQAQTLQVQN

SEQ ID NO: 1007 - protein, 19 aa, synthetic construct
PLNGAVHLYAQAQKGWVQT

SEQ ID NO: 1008 - protein, 19 aa, synthetic construct
PLNGAVHHYAQAQSTSVQN

SEQ ID NO: 1009 - protein, 19 aa, synthetic construct
PLNGYVHLYAQAQTGWVQN

SEQ ID NO: 1010 - protein, 19 aa, synthetic construct
PLNGAVHIYAQAQVQSVQN

SEQ ID NO: 1011 - protein, 19 aa, synthetic construct
PLIGAVHLYAQAQLSPVQN

SEQ ID NO: 1012 - protein, 19 aa, synthetic construct
TLNGAVHLYAQAQLLPVQN

SEQ ID NO: 1013 - protein, 19 aa, synthetic construct
PLNGAVHLYSQAQTGWVQT

SEQ ID NO: 1014 - protein, 19 aa, synthetic construct
ALNGAVHLYAQAQTQLVQN

SEQ ID NO: 1015 - protein, 19 aa, synthetic construct
PLNGAVHLYAQAQSLPVQN

SEQ ID NO: 1016 - protein, 19 aa, synthetic construct
PVNGAVHLYAQAQTGWVPN

SEQ ID NO: 1017 - protein, 19 aa, synthetic construct
PLNGAVHLYAQAKTVSVQN

SEQ ID NO: 1018 - protein, 19 aa, synthetic construct
PLNGAVHLYAQAQTTSVHN

SEQ ID NO: 1019 - protein, 19 aa, synthetic construct
PVNGAVHLYAQAQTGWVQN

SEQ ID NO: 1020 - protein, 19 aa, synthetic construct
PLNGAVHLYAQAHTGWVQI

SEQ ID NO: 1021 - protein, 19 aa, synthetic construct
PLNGAVRLYAQAQTASVQN

SEQ ID NO: 1022 - protein, 19 aa, synthetic construct
PLNGGVHLYAQAQTGLVQK

SEQ ID NO: 1023 - protein, 19 aa, synthetic construct
PLNGAVNLYAQAQVMSVQN

SEQ ID NO: 1024 - protein, 19 aa, synthetic construct
PLNGAVNLYAQAQSMSVQN

SEQ ID NO: 1025 - protein, 19 aa, synthetic construct
PLNGAVHLYAPAQTGWGQN

SEQ ID NO: 1026 - protein, 19 aa, synthetic construct
QLNGAVHLYAQAQTGWAQN

SEQ ID NO: 1027 - protein, 19 aa, synthetic construct
PLNGAVHLYAQAQTVWVQN

SEQ ID NO: 1028 - protein, 19 aa, synthetic construct
QLNGAVHLYAQAQSVSVQN

SEQ ID NO: 1029 - protein, 19 aa, synthetic construct
PLNGAVHLYAQAQTAQLQN

SEQ ID NO: 1030 - protein, 19 aa, synthetic construct
PLNGAVHLYAQAHVASVQN

SEQ ID NO: 1031 - protein, 19 aa, synthetic construct
PLNGAVHLYAKAQRSTVQN

SEQ ID NO: 1032 - protein, 19 aa, synthetic construct
QLNGAVHLYAQAQTGWVKN

SEQ ID NO: 1033 - protein, 19 aa, synthetic construct
PLNGAVHLYAQAQTRWVKN

SEQ ID NO: 1034 - protein, 19 aa, synthetic construct
PLNGAVHLYAQAQTAWIQN

SEQ ID NO: 1035 - protein, 19 aa, synthetic construct
PLNGAVHLYAQAQLSQVKN

SEQ ID NO: 1036 - protein, 19 aa, synthetic construct
SLNGAVHLYAQAQTGWVQN

SEQ ID NO: 1037 - protein, 19 aa, synthetic construct
PLNGAVHLYAQAQTSTVKN

SEQ ID NO: 1038 - protein, 19 aa, synthetic construct
PLNGAVHLYAQAQALPVQN

SEQ ID NO: 1039 - protein, 19 aa, synthetic construct
PLNGAVHLYDQAQTGWFQN

SEQ ID NO: 1040 - protein, 19 aa, synthetic construct
PLNGAVHVYAQAQTGWFQN

SEQ ID NO: 1041 - protein, 19 aa, synthetic construct
PINGAVHLYAQAQVGSVQN

SEQ ID NO: 1042 - protein, 19 aa, synthetic construct
PLNGSVHLYAQAQTTGVQN

SEQ ID NO: 1043 - protein, 19 aa, synthetic construct
PLNGAVHLYAKAQASPVQN

SEQ ID NO: 1044 - protein, 19 aa, synthetic construct
PLNGSVHLYAQAQKAWVQN

SEQ ID NO: 1045 - protein, 19 aa, synthetic construct
SLNGAVHLYAQAQVLGVQN

SEQ ID NO: 1046 - protein, 19 aa, synthetic construct
PLNGAVHLYAQEQLMPVQN

SEQ ID NO: 1047 - protein, 19 aa, synthetic construct
ALNGAVHLYAQSQTGWVQN

SEQ ID NO: 1048 - protein, 19 aa, synthetic construct
PLNGYVHLYDQAQTGWVQN

SEQ ID NO: 1049 - protein, 19 aa, synthetic construct
PLNGAVHLYAQAQTSMVQT

SEQ ID NO: 1050 - protein, 19 aa, synthetic construct
QLNGAVHLYAQAQISSVQN

SEQ ID NO: 1051 - protein, 19 aa, synthetic construct
PVNGAVHLYAQAQTGWVQT

SEQ ID NO: 1052 - protein, 19 aa, synthetic construct
PLNGAVHLYAQEQTATVQN

SEQ ID NO: 1053 - protein, 19 aa, synthetic construct
PLNGAVYLYAQAQTVSVQN

SEQ ID NO: 1054 - protein, 19 aa, synthetic construct
PLNGNVHLYAQAQTASVQN

SEQ ID NO: 1055 - protein, 19 aa, synthetic construct
PLNGYVHLYAQAQTGLVQN

SEQ ID NO: 1056 - protein, 19 aa, synthetic construct
PLNGAVHLYDQAQTLSVQN

SEQ ID NO: 1057 - protein, 19 aa, synthetic construct
PLNGAVHLYAQAQTSSVQH

SEQ ID NO: 1058 - protein, 19 aa, synthetic construct
SLNGAVHLYAQAQTGWVPN

SEQ ID NO: 1059 - protein, 19 aa, synthetic construct
PLNGAVHLYAQAQTAMVKN

SEQ ID NO: 1060 - protein, 19 aa, synthetic construct
TLNGAVHLYAQAQRLSVQN

SEQ ID NO: 1061 - protein, 19 aa, synthetic construct
ALNGAVHLYAQAQTGWVQK

SEQ ID NO: 1062 - protein, 19 aa, synthetic construct
PLNGAVHLYAKAQTALVQN

SEQ ID NO: 1063 - protein, 19 aa, synthetic construct
QLNGAVHLYAQAQTAKVQN

SEQ ID NO: 1064 - protein, 19 aa, synthetic construct
PLNGADHLYAQAQTTSVQN

SEQ ID NO: 1065 - protein, 19 aa, synthetic construct
PLNGAVHLYAQAQTPWVQN

SEQ ID NO: 1066 - protein, 19 aa, synthetic construct
PLNGTVHLYAQAQTGWIQN

SEQ ID NO: 1067 - protein, 19 aa, synthetic construct
PLNGAVHLYAQAHTGWVQH

SEQ ID NO: 1068 - protein, 19 aa, synthetic construct
PLNGAVHLYARAQTASVQN

SEQ ID NO: 1069 - protein, 19 aa, synthetic construct
TLNGAVHLYAQAQRSLVQN

SEQ ID NO: 1070 - protein, 19 aa, synthetic construct
PLNGAVHLYAQAHTGWVQK

SEQ ID NO: 1071 - protein, 19 aa, synthetic construct
PLNGDVHLYAQAQTAQVQN

SEQ ID NO: 1072 - protein, 19 aa, synthetic construct
TLNGAVHLYAQAQTQPVQN

SEQ ID NO: 1073 - protein, 19 aa, synthetic construct
PLNGAVHLYAQAQTPRVQN

SEQ ID NO: 1074 - protein, 19 aa, synthetic construct
PRNGAVHLYAQAQTMSVQN

SEQ ID NO: 1075 - protein, 19 aa, synthetic construct
PLNGAVHLYAQAHTVSVQN

SEQ ID NO: 1076 - protein, 19 aa, synthetic construct
PVNGAVHLYAQAQTGLVQT

SEQ ID NO: 1077 - protein, 19 aa, synthetic construct
PLNGAVHLYAQAQSSSVQN

SEQ ID NO: 1078 - protein, 19 aa, synthetic construct
PLNGAVHLYAQAQRPPVQN

SEQ ID NO: 1079 - protein, 19 aa, synthetic construct
PLNGAVHLYTQAQVSPVQN

SEQ ID NO: 1080 - protein, 19 aa, synthetic construct
PLNGAVPLYAQAQTTPVQN

SEQ ID NO: 1081 - protein, 19 aa, synthetic construct
ALNGAVHLYAQAQTGWVKN

SEQ ID NO: 1082 - protein, 19 aa, synthetic construct
SLNGAVHLYAQAQTGWVRN

SEQ ID NO: 1083 - protein, 19 aa, synthetic construct
PLNGAVHLYAQAQLAGVKN

SEQ ID NO: 1084 - protein, 19 aa, synthetic construct
PLNGAVHLYAQAQTSPAQN

SEQ ID NO: 1085 - protein, 19 aa, synthetic construct
PLNGAVHLYAKAQLSSVQN

SEQ ID NO: 1086 - protein, 19 aa, synthetic construct
PLNGAVHLYAQAQRSPVQT

SEQ ID NO: 1087 - protein, 19 aa, synthetic construct
PLNGAVHLYAHAQTMSVQN

SEQ ID NO: 1088 - protein, 19 aa, synthetic construct
PLNGNVHLYAQAQTGWVKN

SEQ ID NO: 1089 - protein, 19 aa, synthetic construct
PLNGAVHLYAQAQTGWVPH

SEQ ID NO: 1090 - protein, 19 aa, synthetic construct
PLNGAVHLYAQAQPGWGQN

SEQ ID NO: 1091 - protein, 19 aa, synthetic construct
PLNGVVHLYAQAQTVSVQN

SEQ ID NO: 1092 - protein, 19 aa, synthetic construct
PLNGDVHLYAQAQTSSVQN

SEQ ID NO: 1093 - protein, 19 aa, synthetic construct
PLNGAVHIYAQAQTLSVQN

SEQ ID NO: 1094 - protein, 19 aa, synthetic construct
PLNGAVHLYAQAQIPPVQN

SEQ ID NO: 1095 - protein, 19 aa, synthetic construct
SLNGAVHLYAQAQTGWVQH

SEQ ID NO: 1096 - protein, 19 aa, synthetic construct
PLNAAVHLYAQAQTGWDQN

SEQ ID NO: 1097 - protein, 19 aa, synthetic construct
PLNGAVHRYAQAQTTSVQN

SEQ ID NO: 1098 - protein, 19 aa, synthetic construct
PLNGSVHLYAQAQPGSVQN

SEQ ID NO: 1099 - protein, 19 aa, synthetic construct
PLDGAVHLYAQAQTGWVEN

SEQ ID NO: 1100 - protein, 19 aa, synthetic construct
PLNGAVHLYAQAQTGRVKN

SEQ ID NO: 1101 - protein, 19 aa, synthetic construct
PLNGAVHLYAQAQTGRLQN

SEQ ID NO: 1102 - protein, 19 aa, synthetic construct
PLNGSVHLYAQAQTARVQN

SEQ ID NO: 1103 - protein, 19 aa, synthetic construct
PLNGAVHLYDQAQLSSVQN

SEQ ID NO: 1104 - protein, 19 aa, synthetic construct
ALNGAVHLYAQAQTRLVQN

SEQ ID NO: 1105 - protein, 19 aa, synthetic construct
PLNGAVNLYAQAQTAQVQN

SEQ ID NO: 1106 - protein, 19 aa, synthetic construct
PLNGAVHLYAQAQLSSVQH

SEQ ID NO: 1107 - protein, 19 aa, synthetic construct
PLNGAVHLYAQAHTGPVQN

SEQ ID NO: 1108 - protein, 19 aa, synthetic construct
PLKGAVHLYAQAQTLSVQN

SEQ ID NO: 1109 - protein, 19 aa, synthetic construct
ALNGAVHLYAQAQKAWVQN

SEQ ID NO: 1110 - protein, 19 aa, synthetic construct
PLNGAVHLYAQAQAGWVQT

SEQ ID NO: 1111 - protein, 19 aa, synthetic construct
PLNGAVHLYAQAQTGLVQS

SEQ ID NO: 1112 - protein, 19 aa, synthetic construct
PLNGAVHLYAQAQTGCVQI

SEQ ID NO: 1113 - protein, 19 aa, synthetic construct
QLNGAVHLYAQAQPGWVQN

SEQ ID NO: 1114 - protein, 19 aa, synthetic construct
PLNGAVHLYAQAQRPGVQN

SEQ ID NO: 1115 - protein, 19 aa, synthetic construct
PLNGAVHLYAQAQTAAVQH

SEQ ID NO: 1116 - protein, 19 aa, synthetic construct
PLNGADHLYAQAQTMPVQN

SEQ ID NO: 1117 - protein, 19 aa, synthetic construct
PLNGAVHLYAKAQTGWVQT

SEQ ID NO: 1118 - protein, 19 aa, synthetic construct
QLNGAVHLYAQAQKAWVQN

SEQ ID NO: 1119 - protein, 19 aa, synthetic construct
PLNGAVHLYAQAQTGCDQN

SEQ ID NO: 1120 - protein, 19 aa, synthetic construct
PLNGTVHLYAQEQTGSVQN

SEQ ID NO: 1121 - protein, 19 aa, synthetic construct
PLNGAVNLYAQAQSSLVQN

SEQ ID NO: 1122 - protein, 19 aa, synthetic construct
ALNGAVHLYAQAQTGWVEN

SEQ ID NO: 1123 - protein, 19 aa, synthetic construct
PLNGTVHLYAQAQTGWVQY

SEQ ID NO: 1124 - protein, 19 aa, synthetic construct
PINGAVHLYAQAQTGWVQK

SEQ ID NO: 1125 - protein, 19 aa, synthetic construct
PLNGAVHLYAQAQTGRVRN

SEQ ID NO: 1126 - protein, 19 aa, synthetic construct
PLNGAVHLYAQAQTGRDQN

SEQ ID NO: 1127 - protein, 19 aa, synthetic construct
QLNGAVHLYAQAQSALVQN

SEQ ID NO: 1128 - protein, 19 aa, synthetic construct
PLNGVVHLYAQAQTGWVQK

SEQ ID NO: 1129 - protein, 19 aa, synthetic construct
PLNGAVHLYAQAHTGWGQN

SEQ ID NO: 1130 - protein, 19 aa, synthetic construct
PLNGDVHLYAQAQRSLVQN

SEQ ID NO: 1131 - protein, 19 aa, synthetic construct
PLNGNVHLYAQAQTVWVQN

SEQ ID NO: 1132 - protein, 19 aa, synthetic construct
PLNGAVHLYAQAPTGWVQH

SEQ ID NO: 1133 - protein, 19 aa, synthetic construct
PLNGAVHLYSQAQTGWGQN

SEQ ID NO: 1134 - protein, 19 aa, synthetic construct
ALNGSVHLYAQAQTGWVQT

SEQ ID NO: 1135 - protein, 19 aa, synthetic construct
PLNGAVQLYAQAQRSTVQN

SEQ ID NO: 1136 - protein, 19 aa, synthetic construct
PLNGTVHLYAQAQTGTVQN

SEQ ID NO: 1137 - protein, 19 aa, synthetic construct
PLNGTVHLYAQAQTGWVQI

SEQ ID NO: 1138 - protein, 19 aa, synthetic construct
QLNGYVHLYAQAQTGWVQN

SEQ ID NO: 1139 - protein, 10 aa, synthetic construct
PLNGAVHLYA

SEQ ID NO: 1140 - protein, 10 aa, synthetic construct
AQARDSPKGW

SEQ ID NO: 1141 - protein, 10 aa, synthetic construct
LTNGAVRDRP

SEQ ID NO: 1142 - protein, 10 aa, synthetic construct
VQAFTHDSRG

SEQ ID NO: 1143 - protein, 10 aa, synthetic construct
AQAYSTDVRM

SEQ ID NO: 1144 - protein, 10 aa, synthetic construct
AQAYSTDVRI

SEQ ID NO: 1145 - protein, 10 aa, synthetic construct
AQAFTAAERM

SEQ ID NO: 1146 - protein, 10 aa, synthetic construct
AQTHLQIGVA

SEQ ID NO: 1147 - protein, 10 aa, synthetic construct
AQSNAVLSLA

SEQ ID NO: 1148 - protein, 10 aa, synthetic construct
AQAYSTDERM

SEQ ID NO: 1149 - protein, 10 aa, synthetic construct
AQAYSTDVRL

SEQ ID NO: 1150 - protein, 10 aa, synthetic construct
AQATVSTLRM

SEQ ID NO: 1151 - protein, 10 aa, synthetic construct
AQAYSTDERK

SEQ ID NO: 1152 - protein, 10 aa, synthetic construct
AQAYSTDMRM

SEQ ID NO: 1153 - protein, 10 aa, synthetic construct
VVNGAVLHVA

SEQ ID NO: 1154 - protein, 10 aa, synthetic construct
AQAYSTDVTM

SEQ ID NO: 1155 - protein, 10 aa, synthetic construct
AQAHLQIGVA

SEQ ID NO: 1156 - protein, 10 aa, synthetic construct
FLDPAVSSKA

SEQ ID NO: 1157 - protein, 10 aa, synthetic construct
AQAYVSTLRM

SEQ ID NO: 1158 - protein, 10 aa, synthetic construct
AQAQTGPPLK

SEQ ID NO: 1159 - protein, 10 aa, synthetic construct
EQASRLPTPG

SEQ ID NO: 1160 - protein, 10 aa, synthetic construct
AQASVSTMRM

SEQ ID NO: 1161 - protein, 10 aa, synthetic construct
TDYSAVRLGA

SEQ ID NO: 1162 - protein, 10 aa, synthetic construct
TQAYSTDVRM

SEQ ID NO: 1163 - protein, 10 aa, synthetic construct
AQALPSNERL

SEQ ID NO: 1164 - protein, 10 aa, synthetic construct
AQAYSTDVRT

SEQ ID NO: 1165 - protein, 10 aa, synthetic construct
AQSSLPEMVA

SEQ ID NO: 1166 - protein, 10 aa, synthetic construct
AQAGEQSTRL

SEQ ID NO: 1167 - protein, 10 aa, synthetic construct
AQASNDVGRA

SEQ ID NO: 1168 - protein, 10 aa, synthetic construct
AQATFTASEY

SEQ ID NO: 1169 - protein, 10 aa, synthetic construct
AKAHAGTIYS

SEQ ID NO: 1170 - protein, 10 aa, synthetic construct
AQARTIDQCC

SEQ ID NO: 1171 - protein, 10 aa, synthetic construct
AQEYNSNPKA

SEQ ID NO: 1172 - protein, 10 aa, synthetic construct
AQVVDNSTHA

SEQ ID NO: 1173 - protein, 10 aa, synthetic construct
AQATLSVPLK

SEQ ID NO: 1174 - protein, 10 aa, synthetic construct
AQIVMNSLKA

SEQ ID NO: 1175 - protein, 10 aa, synthetic construct
AQATMSQTMA

SEQ ID NO: 1176 - protein, 10 aa, synthetic construct
AQALTQDERW

SEQ ID NO: 1177 - protein, 10 aa, synthetic construct
AQAQLSTLRP

SEQ ID NO: 1178 - protein, 10 aa, synthetic construct
AQVVMGISVA

SEQ ID NO: 1179 - protein, 10 aa, synthetic construct
AQAYTTDVRM

SEQ ID NO: 1180 - protein, 10 aa, synthetic construct
AQHIDSMRPP

SEQ ID NO: 1181 - protein, 10 aa, synthetic construct
AQASTGTLRL

SEQ ID NO: 1182 - protein, 10 aa, synthetic construct
AQHRALDYYA

SEQ ID NO: 1183 - protein, 10 aa, synthetic construct
AQARESPRGL

SEQ ID NO: 1184 - protein, 10 aa, synthetic construct
AQALLAGTRV

SEQ ID NO: 1185 - protein, 10 aa, synthetic construct
TKIQAVPWNA

SEQ ID NO: 1186 - protein, 10 aa, synthetic construct
AQASLSSTRP

SEQ ID NO: 1187 - protein, 10 aa, synthetic construct
AQAMGSRSDQ

SEQ ID NO: 1188 - protein, 10 aa, synthetic construct
AQAAQGTYRG

SEQ ID NO: 1189 - protein, 10 aa, synthetic construct
SQENAVFSKA

SEQ ID NO: 1190 - protein, 10 aa, synthetic construct
AQAYGLPKGP

SEQ ID NO: 1191 - protein, 10 aa, synthetic construct
GGTLAVVSLA

SEQ ID NO: 1192 - protein, 10 aa, synthetic construct
AQAYVSSVKM

SEQ ID NO: 1193-1194 - skipped (2 entries)

SEQ ID NO: 1195 - protein, 20 aa, synthetic construct
VATNHQSAQAQAQTGWVQNQ

SEQ ID NO: 1196 - protein, 12 aa, synthetic construct
TNHQSAQAQAQT

SEQ ID NO: 1197 - protein, 7 aa, synthetic construct
AQAQAQT

SEQ ID NO: 1198 - protein, 13 aa, synthetic construct
ATNHQSAQAQAQT

SEQ ID NO: 1199 - skipped

SEQ ID NO: 1200 - protein, 19 aa, synthetic construct
PLNGDVHLYAQAQTGCVKN

SEQ ID NO: 1201 - protein, 19 aa, synthetic construct
PLNGDVHLYAQAQTGWVKN

SEQ ID NO: 1202 - protein, 19 aa, synthetic construct
PLNGPVHLYAQAQTGWVKN

SEQ ID NO: 1203 - protein, 19 aa, synthetic construct
PLNGSVHLYAQAQTGCVKN

SEQ ID NO: 1204 - protein, 19 aa, synthetic construct
PLNSAVHLYAQAQTGWVKN

SEQ ID NO: 1205 - protein, 19 aa, synthetic construct
PLSGAVHLYAQAQTGWVKN

SEQ ID NO: 1206 - protein, 19 aa, synthetic construct
PPNGAVHLYAQAQTGWVKN

SEQ ID NO: 1207 - protein, 19 aa, synthetic construct
PRNGAVHLYAQAQTGWVKN

SEQ ID NO: 1208 - protein, 19 aa, synthetic construct
PVNGAVHLYAQAQTGWVKN

SEQ ID NO: 1209 - protein, 19 aa, synthetic construct
QLNGAVHIYAQAQTGWVKN

SEQ ID NO: 1210 - protein, 19 aa, synthetic construct
QLNGAVHLYAQAQTGCVKN

SEQ ID NO: 1211 - protein, 19 aa, synthetic construct
QLNGAVHLYAQAQTGLVKN

SEQ ID NO: 1212 - protein, 19 aa, synthetic construct
QLNGAVHLYDQAQTGWVKN

SEQ ID NO: 1213 - protein, 19 aa, synthetic construct
RLNGAVHLYAQAQTGWVKN

SEQ ID NO: 1214 - protein, 19 aa, synthetic construct
SINGAVHLYAQAQTGWVKN

SEQ ID NO: 1215 - protein, 19 aa, synthetic construct
SLNGAVHLYAQAQTGWVKN

SEQ ID NO: 1216 - protein, 19 aa, synthetic construct
SLNGAVNLYAQAQTGWVKN

SEQ ID NO: 1217 - protein, 19 aa, synthetic construct
TLNGAVHLYAQAQTGWVKN

SEQ ID NO: 1218 - protein, 19 aa, synthetic construct
TLNGAVNLYAQAQTGWVKN

SEQ ID NO: 1219 - protein, 19 aa, synthetic construct
PLNGAVHHYAQAQTGWVPN

SEQ ID NO: 1220 - protein, 19 aa, synthetic construct
PLNGAVHLNAQAQTGWVPN

SEQ ID NO: 1221 - protein, 19 aa, synthetic construct
PLNGAVHLSAQAQTGWVPN

SEQ ID NO: 1222 - protein, 19 aa, synthetic construct
PLNGAVHLYAQAQTGCVPN

SEQ ID NO: 1223 - protein, 19 aa, synthetic construct
PLNGAVNLYAQAQTGWVPN

SEQ ID NO: 1224 - protein, 12 aa, synthetic construct
AQAQAQTGWVQN

SEQ ID NO: 1225-1261 - skipped (37 entries)

SEQ ID NO: 1262 - protein, 7 aa, synthetic construct
TLAVPFK

SEQ ID NO: 1263-1499 - skipped (237 entries)

SEQ ID NO: 1500 - protein, 7 aa, synthetic construct
DYTFTNY

SEQ ID NO: 1501 - protein, 6 aa, synthetic construct
DPNSGG

SEQ ID NO: 1502 - protein, 4 aa, synthetic construct
DFDV

SEQ ID NO: 1503 - protein, 5 aa, synthetic construct
NYWMH

SEQ ID NO: 1504 - protein, 17 aa, synthetic construct
RIDPNSGGTRYNEKFKN

SEQ ID NO: 1505 - protein, 8 aa, synthetic construct
DYTFTNYW

SEQ ID NO: 1506 - protein, 8 aa, synthetic construct
IDPNSGGT

SEQ ID NO: 1507 - protein, 6 aa, synthetic construct
AGDFDV

SEQ ID NO: 1508 - protein, 25 aa, synthetic construct
QVQLQQPGAELVKPGASVKLSCKAS

SEQ ID NO: 1509 - protein, 19 aa, synthetic construct
WMHWVKQRPGRGLEWIGRI

SEQ ID NO: 1510 - protein, 41 aa, synthetic construct
TRYNEKFKNKATLTVDKPSSTAYMHLSSLTSEDSAVYYCAG

SEQ ID NO: 1511 - protein, 11 aa, synthetic construct
WGTGTTVTVSS

SEQ ID NO: 1512 - protein, 113 aa, synthetic construct
QVQLQQPGAELVKPGASVKLSCKASDYTFTNYWMHWVKQRPGRGLEWIGRIDPNSGGTRYNEKFKNKATLTVDKPSSTAYMHLSSLTSEDSAVYYCAGDFDVWGTGTTVTVSS

SEQ ID NO: 1513 - DNA, 339 bp, synthetic construct
  source 1..339: mol_type = other DNA
caggtccaactgcagcagcctggggctgagcttgtgaagcctggggcttcagtgaagctgtcctgcaaggcttctgactacaccttcaccaactactggatgcactgggtgaagcagaggcctggacgaggccttgagtggataggaaggattgatcctaatagtggtggtactaggtacaatgagaagttcaagaacaaggccacactgactgttgacaaaccctccagcacagcctacatgcatctcagcagcctgacatctgaggactctgcggtctattattgtgcaggggacttcgatgtctggggcacagggaccacggtcaccgtctcctca

SEQ ID NO: 1514 - protein, 11 aa, synthetic construct
RASGNIHNYLA

SEQ ID NO: 1515 - protein, 7 aa, synthetic construct
NAKTLPD

SEQ ID NO: 1516 - protein, 9 aa, synthetic construct
QHFWSTPLT

SEQ ID NO: 1517 - protein, 6 aa, synthetic construct
GNIHNY

SEQ ID NO: 1518 - skipped

SEQ ID NO: 1519 - protein, 23 aa, synthetic construct
DIQMTQSPASLSASVGETVTITC

SEQ ID NO: 1520 - protein, 15 aa, synthetic construct
WYQQRQGKSPQLLVY

SEQ ID NO: 1521 - protein, 32 aa, synthetic construct
GVPSRFSGSGSGTQYSLKINSLQPEDFGSYCC

SEQ ID NO: 1522 - protein, 10 aa, synthetic construct
FGAGTKLELK

SEQ ID NO: 1523 - protein, 107 aa, synthetic construct
DIQMTQSPASLSASVGETVTITCRASGNIHNYLAWYQQRQGKSPQLLVYNAKTLPDGVPSRFSGSGSGTQYSLKINSLQPEDFGSYCCQHFWSTPLTFGAGTKLELK

SEQ ID NO: 1524 - DNA, 321 bp, synthetic construct
  source 1..321: mol_type = other DNA
gacatccagatgactcagtctccagcctccctatctgcatctgtgggagaaactgtcaccatcacatgtcgagcaagtgggaatattcacaattatttagcatggtatcagcagagacagggaaaatctcctcagctcctggtctataatgcaaaaaccttaccagatggtgtgccatcaaggttcagtggcagtggatcaggaacacaatattctctcaagatcaacagcctgcagcctgaagattttgggagttattgctgtcaacatttttggagtactccgctcacgttcggtgctgggaccaagttggagctgaaa

SEQ ID NO: 1525 - protein, 7 aa, synthetic construct
GFTFTDY

SEQ ID NO: 1526 - protein, 8 aa, synthetic construct
RNKAKGFT

SEQ ID NO: 1527 - protein, 4 aa, synthetic construct
DINY

SEQ ID NO: 1528 - protein, 5 aa, synthetic construct
DYYMS

SEQ ID NO: 1529 - protein, 19 aa, synthetic construct
LIRNKAKGFTTEYSASVKG

SEQ ID NO: 1530 - protein, 8 aa, synthetic construct
GFTFTDYY

SEQ ID NO: 1531 - protein, 10 aa, synthetic construct
IRNKAKGFTT

SEQ ID NO: 1532 - protein, 6 aa, synthetic construct
VRDINY

SEQ ID NO: 1533 - protein, 25 aa, synthetic construct
EVQLVESGGALVQPGGSLSLSCAAS

SEQ ID NO: 1534 - protein, 19 aa, synthetic construct
YMSWVRQPPGKALEWLALI

SEQ ID NO: 1535 - protein, 41 aa, synthetic construct
TEYSASVKGRFTISRDNSQSILLFQMNDLRADDSATYYCVR

SEQ ID NO: 1536 - protein, 11 aa, synthetic construct
WGQGTTLTVSS

SEQ ID NO: 1537 - protein, 115 aa, synthetic construct
EVQLVESGGALVQPGGSLSLSCAASGFTFTDYYMSWVRQPPGKALEWLALIRNKAKGFTTEYSASVKGRFTISRDNSQSILLFQMNDLRADDSATYYCVRDINYWGQGTTLTVSS

SEQ ID NO: 1538 - DNA, 345 bp, synthetic construct
  source 1..345: mol_type = other DNA
gaggtgcagctggtggagtctggaggagccttggtacagcctgggggttctctgagtctctcctgtgcagcttctggattcaccttcactgattactacatgagctgggtccgccagcctccagggaaggcacttgagtggctggctttgattagaaacaaagctaaaggtttcacaacagaatacagtgcatctgtgaagggtcggttcaccatctccagagataattcccaaagcatcctcctttttcaaatgaatgacctgagagctgacgacagtgccacttattactgtgtaagagatataaactactggggccaaggcaccactctcacagtctcctca

SEQ ID NO: 1539 - protein, 17 aa, synthetic construct
KSSQSLLYSTNQENYLA

SEQ ID NO: 1540 - protein, 7 aa, synthetic construct
WASSRES

SEQ ID NO: 1541 - protein, 9 aa, synthetic construct
QQYYSYPRT

SEQ ID NO: 1542 - protein, 12 aa, synthetic construct
QSLLYSTNQENY

SEQ ID NO: 1543 - skipped

SEQ ID NO: 1544 - protein, 23 aa, synthetic construct
DIVMSQSPSSLAVSVGEKVTMSC

SEQ ID NO: 1545 - protein, 15 aa, synthetic construct
WYQQKPGQSPKLLIY

SEQ ID NO: 1546 - protein, 32 aa, synthetic construct
GVPDRFTGSGSGTDFTLTISSVKAEDLAVYYC

SEQ ID NO: 1547 - protein, 10 aa, synthetic construct
FGGGTKLEIK

SEQ ID NO: 1548 - protein, 113 aa, synthetic construct
DIVMSQSPSSLAVSVGEKVTMSCKSSQSLLYSTNQENYLAWYQQKPGQSPKLLIYWASSRESGVPDRFTGSGSGTDFTLTISSVKAEDLAVYYCQQYYSYPRTFGGGTKLEIK

SEQ ID NO: 1549 - DNA, 339 bp, synthetic construct
  source 1..339: mol_type = other DNA
gacattgtgatgtcacagtctccatcctccctagctgtgtcagttggagagaaggttactatgagctgcaagtccagtcagagccttttatatagtaccaatcaagagaactacttggcctggtaccagcagaaaccagggcagtctcctaaactgctgatttactgggcatcctctagggaatctggggtccctgatcgctttacaggcagtggatctgggacagatttcactctcaccatcagcagtgtgaaggctgaagacctggcagtttattactgtcagcaatattatagctatcctcggacgttcggtggaggcaccaagctggaaatcaaa

SEQ ID NO: 1550 - protein, 7 aa, synthetic construct
GFTFTRY

SEQ ID NO: 1551 - protein, 6 aa, synthetic construct
NPNNGG

SEQ ID NO: 1552 - protein, 9 aa, synthetic construct
GTGTGAMDY

SEQ ID NO: 1553 - protein, 5 aa, synthetic construct
RYWMH

SEQ ID NO: 1554 - protein, 17 aa, synthetic construct
NINPNNGGTDFNEKFKN

SEQ ID NO: 1555 - protein, 8 aa, synthetic construct
GFTFTRYW

SEQ ID NO: 1556 - protein, 8 aa, synthetic construct
INPNNGGT

SEQ ID NO: 1557 - protein, 11 aa, synthetic construct
ARGTGTGAMDY

SEQ ID NO: 1558 - protein, 25 aa, synthetic construct
QVQLQQPGTELVKPGSSVNLSCKAS

SEQ ID NO: 1559 - protein, 19 aa, synthetic construct
WMHWVKERPGHGLEWIGNI

SEQ ID NO: 1560 - protein, 41 aa, synthetic construct
TDFNEKFKNKATLTVHKSSTTVFIQLSSLTSEDSAVYYCAR

SEQ ID NO: 1561 - protein, 11 aa, synthetic construct
WGQGTSVTVSS

SEQ ID NO: 1562 - protein, 118 aa, synthetic construct
QVQLQQPGTELVKPGSSVNLSCKASGFTFTRYWMHWVKERPGHGLEWIGNINPNNGGTDFNEKFKNKATLTVHKSSTTVFIQLSSLTSEDSAVYYCARGTGTGAMDYWGQGTSVTVSS

SEQ ID NO: 1563 - DNA, 354 bp, synthetic construct
  source 1..354: mol_type = other DNA
caggtccaactgcagcagcctgggactgaactggtgaagcctgggtcttcagtgaacctgtcctgcaaggcttctggcttcaccttcaccaggtactggatgcactgggtgaaggagaggcctggacatggccttgagtggattggaaatattaatcctaacaatggtggtactgacttcaatgagaagttcaagaacaaggccacactgactgtacacaagtcctccaccacagtcttcatccaactcagcagcctgacatctgaggactctgcggtctattattgtgcaagaggaactgggacgggagctatggactactggggtcaaggaacctcagtcaccgtctcctca

SEQ ID NO: 1564 - protein, 16 aa, synthetic construct
RSSQSLVHNNGITYLY

SEQ ID NO: 1565 - protein, 7 aa, synthetic construct
RVSNRFS

SEQ ID NO: 1566 - protein, 9 aa, synthetic construct
FQGTHVPRT

SEQ ID NO: 1567 - protein, 16 aa, synthetic construct
RSSQSLVHNNGITYLY

SEQ ID NO: 1568 - protein, 11 aa, synthetic construct
QSLVHNNGITY

SEQ ID NO: 1569 - skipped

SEQ ID NO: 1570 - protein, 23 aa, synthetic construct
DVVMTQTPLSLPVSLGDQASISC

SEQ ID NO: 1571 - protein, 15 aa, synthetic construct
WYLQKPGQSPKLLIY

SEQ ID NO: 1572 - protein, 32 aa, synthetic construct
GVPDRFGGSGSGTDFTLKISRVEAEDLGVYFC

SEQ ID NO: 1573 - protein, 112 aa, synthetic construct
DVVMTQTPLSLPVSLGDQASISCRSSQSLVHNNGITYLYWYLQKPGQSPKLLIYRVSNRFSGVPDRFGGSGSGTDFTLKISRVEAEDLGVYFCFQGTHVPRTFGGGTKLEIK

SEQ ID NO: 1574 - DNA, 336 bp, synthetic construct
  source 1..336: mol_type = other DNA
gatgttgtgatgacccaaactccactctccctgcctgtcagtcttggagatcaagcttccatctcttgcagatctagtcagagccttgtacacaacaatggaatcacctatttatattggtacctgcagaagccaggccagtctccaaagctcctgatctacagggtttccaaccgattttctggggtcccagacaggttcggtggcagtggatcagggacagatttcacactcaagatcagcagagtggaggctgaggatctgggagtttatttctgctttcaaggtacacatgttcctcggacgttcggtggaggcaccaagctggaaatcaaa

SEQ ID NO: 1575 - protein, 7 aa, synthetic construct
GYTFTIF

SEQ ID NO: 1576 - protein, 5 aa, synthetic construct
IFWMH

SEQ ID NO: 1577 - protein, 17 aa, synthetic construct
KINPNNGGGDYNEKFKS

SEQ ID NO: 1578 - protein, 8 aa, synthetic construct
GYTFTIFW

SEQ ID NO: 1579 - protein, 8 aa, synthetic construct
INPNNGGG

SEQ ID NO: 1580 - protein, 25 aa, synthetic construct
QVQLQQPGTELVKPGASVKLSCKAS

SEQ ID NO: 1581 - protein, 19 aa, synthetic construct
WMHWVKQRPGHGLEWIGKI

SEQ ID NO: 1582 - protein, 41 aa, synthetic construct
GDYNEKFKSKATLTVDKSSTTAYLQLSSLTSEDSAVYYCAR

SEQ ID NO: 1583 - protein, 118 aa, synthetic construct
QVQLQQPGTELVKPGASVKLSCKASGYTFTIFWMHWVKQRPGHGLEWIGKINPNNGGGDYNEKFKSKATLTVDKSSTTAYLQLSSLTSEDSAVYYCARGTGTGAMDYWGQGTSVTVSS

SEQ ID NO: 1584 - DNA, 354 bp, synthetic construct
  source 1..354: mol_type = other DNA
caggtccaactgcagcagcctgggactgaactggtgaagcctggggcttcagtgaagctgtcctgcaaggcttctggctacaccttcaccatcttctggatgcactgggtgaagcagaggcctggacatggccttgagtggattggaaagattaatcctaacaatggaggtggtgactacaatgagaaattcaagagtaaggccacattgactgtagacaaatcctccaccacagcctacttgcagctcagcagcctgacatctgaggactctgcggtctattattgtgcaagaggaactgggacgggagctatggactactggggtcaaggaacctcagtcaccgtctcctca

SEQ ID NO: 1585 - protein, 16 aa, synthetic construct
RSSQSLVHSNGITHLY

SEQ ID NO: 1586 - protein, 11 aa, synthetic construct
QSLVHSNGITH

SEQ ID NO: 1587 - protein, 23 aa, synthetic construct
DVVMTQTPLSLPVSLGDHASISC

SEQ ID NO: 1588 - protein, 15 aa, synthetic construct
WYLQRPGQTPKLLIY

SEQ ID NO: 1589 - protein, 32 aa, synthetic construct
GVPDRFSGSGSGTDFTLKISSVEAEDLGVYFC

SEQ ID NO: 1590 - protein, 10 aa, synthetic construct
FGGGTKLEIE

SEQ ID NO: 1591 - protein, 112 aa, synthetic construct
DVVMTQTPLSLPVSLGDHASISCRSSQSLVHSNGITHLYWYLQRPGQTPKLLIYRVSNRFSGVPDRFSGSGSGTDFTLKISSVEAEDLGVYFCFQGTHVPRTFGGGTKLEIE

SEQ ID NO: 1592 - DNA, 336 bp, synthetic construct
  source 1..336: mol_type = other DNA
gatgttgtgatgacccaaactccactctccctgcctgtcagtcttggagatcacgcttccatctcttgcagatctagtcagagccttgtacacagcaatggaatcacccatttatattggtacctgcagaggccaggccagactccaaagctcctgatctacagggtttccaaccgattttctggggtcccagacaggttcagtggcagtggatcagggacagatttcacactcaagatcagcagcgtggaggctgaggatctgggagtttatttctgctttcaaggtacacatgttcctcggacgttcggtggaggcaccaagctggaaatcgaa

SEQ ID NO: 1593 - protein, 7 aa, synthetic construct
GYTFTRF

SEQ ID NO: 1594 - protein, 5 aa, synthetic construct
RFWMH

SEQ ID NO: 1595 - protein, 17 aa, synthetic construct
NINPNNGGTDNNERFKS

SEQ ID NO: 1596 - protein, 8 aa, synthetic construct
GYTFTRFW

SEQ ID NO: 1597 - protein, 19 aa, synthetic construct
WMHWVKQRPGQGLEWIGNI

SEQ ID NO: 1598 - protein, 41 aa, synthetic construct
TDNNERFKSKATLTVDRSSSTAYMQLSSLTSEDSAVYYCAR

SEQ ID NO: 1599 - protein, 118 aa, synthetic construct
QVQLQQPGTELVKPGASVKLSCKASGYTFTRFWMHWVKQRPGQGLEWIGNINPNNGGTDNNERFKSKATLTVDRSSSTAYMQLSSLTSEDSAVYYCARGTGTGAMDYWGQGTSVTVSS

SEQ ID NO: 1600 - DNA, 354 bp, synthetic construct
  source 1..354: mol_type = other DNA
caggtccaactgcagcagcctgggactgaactggtgaagcctggggcttcagtgaagctgtcctgcaaggcttctggctacaccttcaccaggttctggatgcactgggtgaagcagaggcctggacaaggccttgagtggattggaaatattaatcctaacaatggtggtactgacaataatgagaggttcaagagcaaggccacactgactgtagacagatcctccagcacagcctacatgcagctcagcagcctgacatctgaggactctgcggtctattattgtgcaagaggaactgggacgggagctatggactactggggtcaaggaacctcagtcaccgtctcctca

SEQ ID NO: 1601 - protein, 16 aa, synthetic construct
RSSQSLVHSNGNTHLY

SEQ ID NO: 1602 - protein, 7 aa, synthetic construct
RVSSRFS

SEQ ID NO: 1603 - protein, 11 aa, synthetic construct
QSLVHSNGNTH

SEQ ID NO: 1604 - protein, 23 aa, synthetic construct
DVVMTQTPLSLPVSLGDQASISC

SEQ ID NO: 1605 - protein, 32 aa, synthetic construct
GVPDRFSGSGSGTDFTLKISRVEAEDLGVYFC

SEQ ID NO: 1606 - protein, 112 aa, synthetic construct
DVVMTQTPLSLPVSLGDQASISCRSSQSLVHSNGNTHLYWYLQKPGQSPKLLIYRVSSRFSGVPDRFSGSGSGTDFTLKISRVEAEDLGVYFCFQGTHVPRTFGGGTKLEIK

SEQ ID NO: 1607 - DNA, 336 bp, synthetic construct
  source 1..336: mol_type = other DNA
gatgtggtgatgacccaaactccactctccctgcctgtcagtcttggagatcaggcttccatctcttgcagatctagtcagagccttgtacacagcaatggaaacacccatttatattggtacctgcagaagccaggccagtctccaaagctcctgatctacagggtttccagccgattttctggggtcccagacaggttcagtggcagtggatcagggacagatttcacactcaagatcagcagagtggaggctgaggatctgggagtttatttctgctttcagggtacacatgttcctcggacgttcggtggaggcaccaagctggaaatcaaa

SEQ ID NO: 1608 - protein, 9 aa, synthetic construct
GFSLSTSAM

SEQ ID NO: 1609 - protein, 5 aa, synthetic construct
YWDDD

SEQ ID NO: 1610 - protein, 9 aa, synthetic construct
RRRGYGMDY

SEQ ID NO: 1611 - protein, 7 aa, synthetic construct
TSAMGVS

SEQ ID NO: 1612 - protein, 16 aa, synthetic construct
HIYWDDDKRYNPSLKS

SEQ ID NO: 1613 - protein, 10 aa, synthetic construct
GFSLSTSAMG

SEQ ID NO: 1614 - protein, 7 aa, synthetic construct
IYWDDDK

SEQ ID NO: 1615 - protein, 11 aa, synthetic construct
ARRRRGYGMDY

SEQ ID NO: 1616 - protein, 25 aa, synthetic construct
QITLKESGPGILQSSQTLSLTCSFS

SEQ ID NO: 1617 - protein, 19 aa, synthetic construct
GVSWIRQPSGEGLEWLAHI

SEQ ID NO: 1618 - protein, 41 aa, synthetic construct
KRYNPSLKSRLTISKDTSRNQVFLKITSVDTADTATYYCAR

SEQ ID NO: 1619 - protein, 119 aa, synthetic construct
QITLKESGPGILQSSQTLSLTCSFSGFSLSTSAMGVSWIRQPSGEGLEWLAHIYWDDDKRYNPSLKSRLTISKDTSRNQVFLKITSVDTADTATYYCARRRRGYGMDYWGQGTSVTVSS

SEQ ID NO: 1620 - DNA, 357 bp, synthetic construct
  source 1..357: mol_type = other DNA
cagattactctgaaagagtctggccctgggatattgcagtcctcccagaccctcagtctgacttgttctttctctgggttttcactgagcacttctgctatgggtgtgagttggattcgtcagccttcaggagagggtctggagtggctggcacacatttactgggatgatgacaagcgctataacccatccctgaagagccggctcacaatctccaaggatacctccagaaaccaggtattcctcaagatcaccagtgtggacactgcagatactgccacatactactgtgctcgaagaaggagggggtatggtatggactactggggtcaaggaacctcagtcaccgtctcctca

SEQ ID NO: 1621 - protein, 11 aa, synthetic construct
KASQSVSNDVA

SEQ ID NO: 1622 - protein, 7 aa, synthetic construct
YASNRCT

SEQ ID NO: 1623 - protein, 9 aa, synthetic construct
QQDYRSPLT

SEQ ID NO: 1624 - protein, 6 aa, synthetic construct
QSVSND

SEQ ID NO: 1625 - skipped

SEQ ID NO: 1626 - protein, 23 aa, synthetic construct
SIVMTQTPKFLLVSAGDRVTITC

SEQ ID NO: 1627 - protein, 32 aa, synthetic construct
GVPDRFTGSGYGTDFTFTISTVQAEDLAVYFC

SEQ ID NO: 1628 - protein, 10 aa, synthetic construct
FGAGTKLELK

SEQ ID NO: 1629 - protein, 107 aa, synthetic construct
SIVMTQTPKFLLVSAGDRVTITCKASQSVSNDVAWYQQKPGQSPKLLIYYASNRCTGVPDRFTGSGYGTDFTFTISTVQAEDLAVYFCQQDYRSPLTFGAGTKLELK

SEQ ID NO: 1630 - DNA, 321 bp, synthetic construct
  source 1..321: mol_type = other DNA
agtattgtgatgacccagactcccaaattcctgcttgtatcagcaggagacagggttaccataacctgcaaggccagtcagagtgtgagtaatgatgtagcttggtaccaacagaagccagggcagtctcctaaactgctaatatactatgcatccaatcgctgcactggagtccctgatcgcttcactggcagtggatatgggacggatttcactttcaccatcagcactgtacaggctgaagacctggcagtttatttctgtcagcaggattataggtctccgctcacgttcggtgctgggaccaagctggagctgaaa

SEQ ID NO: 1631 - protein, 7 aa, synthetic construct
  VARIANT 2: note = F or Y
  VARIANT 6: note = R or I
  VARIANT 7: note = Y or F
GXTFTXX

SEQ ID NO: 1632 - protein, 16 aa, synthetic construct
  VARIANT 9: note = N or S
  VARIANT 12: note = I or N
  VARIANT 14: note = Y or H
RSSQSLVHXNGXTXLY

SEQ ID NO: 1633 - protein, 7 aa, synthetic construct
  VARIANT 4: note = N or S
RVSXRFS

SEQ ID NO: 1634 - skipped

SEQ ID NO: 1635 - protein, 17 aa, synthetic construct
  VARIANT 1: note = N or K
  VARIANT 9: note = T or G
  VARIANT 11: note = F, Y, or N
  VARIANT 14: note = K or R
  VARIANT 17: note = N or S
XINPNNGGXDXNEXFKX

SEQ ID NO: 1636 - protein, 16 aa, synthetic construct
  VARIANT 9: note = N or S
  VARIANT 12: note = I or N
  VARIANT 14: note = Y or H
RSSQSLVHXNGXTXLY

SEQ ID NO: 1637 - protein, 8 aa, synthetic construct
  VARIANT 2: note = F or Y
  VARIANT 6: note = R or I
  VARIANT 7: note = Y or F
GXTFTXXW

SEQ ID NO: 1638 - protein, 8 aa, synthetic construct
  VARIANT 8: note = T or G
INPNNGGX

SEQ ID NO: 1639 - protein, 11 aa, synthetic construct
  VARIANT 6: note = N or S
  VARIANT 9: note = I or N
  VARIANT 11: note = Y or H
QSLVHXNGXTX

SEQ ID NO: 1640-1739 - skipped (100 entries)

SEQ ID NO: 1740 - DNA, 57 bp, synthetic construct
  source 1..57: mol_type = other DNA
atgaacttcgggctcagcttgattttccttgtccttgttttaaaaggtgtccagtgt

SEQ ID NO: 1741 - DNA, 57 bp, synthetic construct
  source 1..57: mol_type = other DNA
atgggatggagctggatctttctctttctcctgtcaggaactacaggtgtcctctct

SEQ ID NO: 1742 - DNA, 969 bp, synthetic construct
  source 1..969: mol_type = other DNA
gccaaaacgacacccccatctgtctatccactggcccctggatctgctgcccaaactaactccatggtgaccctgggatgcctggtcaagggctatttccctgagccagtgacagtgacctggaactctggatccctgtccagcggtgtgcacaccttcccagctgtcctgcagtctgacctctacactctgagcagctcagtgactgtcccctccagcacctggcccagcgagaccgtcacctgcaacgttgcccacccggccagcagcaccaaggtggacaagaaaattgtgcccagggattgtggttgtaagccttgcatatgtacagtcccagaagtatcatctgtcttcatcttccccccaaagcccaaggatgtgctcaccattactctgactcctaaggtcacgtgtgttgtggtagacatcagcaaggatgatcccgaggtccagttcagctggtttgtagatgatgtggaggtgcacacagctcagacgcaaccccgggaggagcagttcaacagcactttccgctcagtcagtgaacttcccatcatgcaccaggactggctcaatggcaaggagttcaaatgcagggtcaacagtgcagctttccctgcccccatcgagaaaaccatctccaaaaccaaaggcagaccgaaggctccacaggtgtacaccattccacctcccaaggagcagatggccaaggataaagtcagtctgacctgcatgataacagacttcttccctgaagacattactgtggagtggcagtggaatgggcagccagcggagaactacaagaacactcagcccatcatggacacagatggctcttacttcgtctacagcaagctcaatgtgcagaagagcaactgggaggcaggaaatactttcacctgctctgtgttacatgagggcctgcacaaccaccatactgagaagagcctctcccactctcctggt

SEQ ID NO: 1743 - DNA, 972 bp, synthetic construct
  source 1..972: mol_type = other DNA
gccaaaacgacacccccatctgtctatccactggcccctggatctgctgcccaaactaactccatggtgaccctgggatgcctggtcaagggctatttccctgagccagtgacagtgacctggaactctggatccctgtccagcggtgtgcacaccttcccagctgtcctgcagtctgacctctacactctgagcagctcagtgactgtcccctccagcacctggcccagcgagaccgtcacctgcaacgttgcccacccggccagcagcaccaaggtggacaagaaaattgtgcccagggattgtggttgtaagccttgcatatgtacagtcccagaagtatcatctgtcttcatcttccccccaaagcccaaggatgtgctcaccattactctgactcctaaggtcacgtgtgttgtggtagacatcagcaaggatgatcccgaggtccagttcagctggtttgtagatgatgtggaggtgcacacagctcagacgcaaccccgggaggagcagttcaacagcactttccgctcagtcagtgaacttcccatcatgcaccaggactggctcaatggcaaggagttcaaatgcagggtcaacagtgcagctttccctgcccccatcgagaaaaccatctccaaaaccaaaggcagaccgaaggctccacaggtgtacaccattccacctcccaaggagcagatggccaaggataaagtcagtctgacctgcatgataacagacttcttccctgaagacattactgtggagtggcagtggaatgggcagccagcggagaactacaagaacactcagcccatcatggacacagatggctcttacttcgtctacagcaagctcaatgtgcagaagagcaactgggaggcaggaaatactttcacctgctctgtgttacatgagggcctgcacaaccaccatactgagaagagcctctcccactctcctggtaag

SEQ ID NO: 1744 - protein, 10 aa, synthetic construct
GFNIKDYYIH

SEQ ID NO: 1745 - protein, 16 aa, synthetic construct
WIDPENGDTEYAPKFQ

SEQ ID NO: 1746 - protein, 4 aa, synthetic construct
APGY

SEQ ID NO: 1747 - protein, 16 aa, synthetic construct
NIDPSDSETHYNQKFK

SEQ ID NO: 1748 - protein, 11 aa, synthetic construct
SGFTFTDYYMS

SEQ ID NO: 1749 - protein, 16 aa, synthetic construct
NRNKTKGYTTEYSASV

SEQ ID NO: 1750 - protein, 4 aa, synthetic construct
GMDY

SEQ ID NO: 1751 - protein, 10 aa, synthetic construct
GFTFSTYPMS

SEQ ID NO: 1752 - protein, 14 aa, synthetic construct
SISNGGSTYYPDTV

SEQ ID NO: 1753 - protein, 8 aa, synthetic construct
GRDYHFDF

SEQ ID NO: 1754 - protein, 10 aa, synthetic construct
GYTFTNYWIN

SEQ ID NO: 1755 - protein, 16 aa, synthetic construct
IYPGSTRANYNEKFKS

SEQ ID NO: 1756 - protein, 4 aa, synthetic construct
THSI

SEQ ID NO: 1757 - protein, 10 aa, synthetic construct
GYTFISNWMH

SEQ ID NO: 1758 - protein, 16 aa, synthetic construct
IDPSDSETHYNQKFKD

SEQ ID NO: 1759 - protein, 10 aa, synthetic construct
RDRDGYYFDY

SEQ ID NO: 1760 - protein, 15 aa, synthetic construct
IYPGSTRANYNEKFK

SEQ ID NO: 1761 - protein, 13 aa, synthetic construct
KASGYTFTDRTIH

SEQ ID NO: 1762 - protein, 16 aa, synthetic construct
YIYPGDGSTKYNENFK

SEQ ID NO: 1763 - protein, 6 aa, synthetic construct
RGAMDY

SEQ ID NO: 1764 - protein, 16 aa, synthetic construct
YIYPGDDSTKYNDNFK

SEQ ID NO: 1765 - protein, 6 aa, synthetic construct
RGTMDY

SEQ ID NO: 1766 - protein, 13 aa, synthetic construct
KASGNTFTDYEIH

SEQ ID NO: 1767 - protein, 16 aa, synthetic construct
AIDPETGNTAYNQKFK

SEQ ID NO: 1768 - protein, 6 aa, synthetic construct
SRGFDY

SEQ ID NO: 1769 - protein, 5 aa, synthetic construct
SYGMS

SEQ ID NO: 1770 - protein, 5 aa, synthetic construct
KYGMS

SEQ ID NO: 1771 - protein, 17 aa, synthetic construct
TISSSGSRTYFPDSVKG

SEQ ID NO: 1772 - protein, 17 aa, synthetic construct
TISSSGSRTYYPDSVKG

SEQ ID NO: 1773 - protein, 32 aa, synthetic construct
RFTISRDNAKNTLYLQMSSSKSEDTAMYYCSI

SEQ ID NO: 1774 - protein, 8 aa, synthetic construct
TWDGAMDY

SEQ ID NO: 1775 - protein, 8 aa, synthetic construct
SWDGAMDY

SEQ ID NO: 1776 - protein, 11 aa, synthetic construct
WGQGTSVTVSS

SEQ ID NO: 1777 - protein, 14 aa, synthetic construct
WVRQAPGKGLEWVA

SEQ ID NO: 1778 - protein, 32 aa, synthetic construct
  VARIANT 18: note = Any amino acid
  VARIANT 20: note = Any amino acid
  VARIANT 21: note = Any amino acid
  VARIANT 22: note = Any amino acid
  VARIANT 31: note = Any amino acid
RFTISRDNAKNTLYLQMXSXXXEDTAMYYCXI

SEQ ID NO: 1779 - protein, 11 aa, synthetic construct
  VARIANT 6: note = Any amino acid
WGQGTXVTVSS

SEQ ID NO: 1780 - protein, 13 aa, synthetic construct
KGSGYTFSNYWIE

SEQ ID NO: 1781 - protein, 17 aa, synthetic construct
EILPGSDSIKYEKNFKG

SEQ ID NO: 1782 - protein, 9 aa, synthetic construct
ARRGNYVDD

SEQ ID NO: 1783 - protein, 7 aa, synthetic construct
GYTFSSS

SEQ ID NO: 1784 - protein, 5 aa, synthetic construct
SSWMG

SEQ ID NO: 1785 - protein, 6 aa, synthetic construct
LPGSGG

SEQ ID NO: 1786 - protein, 17 aa, synthetic construct
DILPGSGGTNYNERFKG

SEQ ID NO: 1787 - protein, 9 aa, synthetic construct
SYYDYDRFA

SEQ ID NO: 1788 - protein, 10 aa, synthetic construct
SYYDYDRFAN

SEQ ID NO: 1789 - protein, 7 aa, synthetic construct
GFTFSSY

SEQ ID NO: 1790 - protein, 5 aa, synthetic construct
SYAMS

SEQ ID NO: 1791 - protein, 5 aa, synthetic construct
SKGGN

SEQ ID NO: 1792 - protein, 16 aa, synthetic construct
SISKGGNTYYPNSVKG

SEQ ID NO: 1793 - protein, 9 aa, synthetic construct
GWGDYGWFA

SEQ ID NO: 1794 - protein, 10 aa, synthetic construct
GWGDYGWFAY

SEQ ID NO: 1795 - protein, 125 aa, synthetic construct
LPEVQLEESGAELVRSGASVTLSCTASGFNIKDYYIHWVKQRPEQGLEWIGWIDPENGDTEYAPKFQGKATMTADTSSNTAYLQLSSLTSEDTAVYYCNGAPGYWGPGTTLTVSSAKTTPPSVYS

SEQ ID NO: 1796 - protein, 131 aa, synthetic construct
LPEVQLEQSGAELVKPGASVKLSCKASGYTFISNWMHWVKQRPGQGLEWIGNIDPSDSETHYNQKFKDKATLTVDKSSSTAYMQLSSLTSEDSAVYYCARRDRDGYYFDYWGQGTTLTVSSAKTTPPSVYS

SEQ ID NO: 1797 - protein, 127 aa, synthetic construct
LPEVQLEESGGGLVQPGGSLSLSCAASGFTFTDYYMSWVRQPPGKALEWVALNRNKTKGYTTEYSASVKGRFTISRDNSQSILYLQMNALRAEDSATYYCARGMDYWGQGTSVTVSSAKTTPPSVYS

SEQ ID NO: 1798 - protein, 128 aa, synthetic construct
LPEVQLEESGGGLVKPGGSLKLSCAASGFTFSTYPMSWVRQTPEKRLEWVASISNGGSTYYPDTVKGRFTISRDNARNILYLQMSSLRSEDTAMYYCARGRDYHFDFWGQGTTLTVSSAKTTPPSVYS

SEQ ID NO: 1799 - protein, 125 aa, synthetic construct
LPQVQLEESGAELVKPGASVKLSCKASGYTFTNYWINWVKQRPGQGLEWIGNIYPGSTRANYNEKFKSKATLTVDTSSSTAYMQVSSLTSDDSAVYYCTRTHSIWGQGTQVTVSAAKTTPPSVYS

SEQ ID NO: 1800 - protein, 131 aa, synthetic construct
LPEVKLEESGAELVKPGASVKLSCKASGYTFISNWMHWVKQRPGQGLEWIGNIDPSDSETHYNQKFKDKATLTVDKSSSTAYMQLSSLTSEDSAVYYCARRDRDGYYFDYWGQGTTLTVSSAKTTPPSVYS

SEQ ID NO: 1801 - protein, 125 aa, synthetic construct
LPEVKLEQSGAELVKPGASVKLSCKASGYTFTNYWINWVKQRPGQGLEWIGNIYPGSTRANYNEKFKSKATLTVDTSSSTAYMQVSSLTSDDSAVYYCTRTHSIWGQGTQVTVSAAKTTPPSVYS

SEQ ID NO: 1802 - protein, 439 aa, synthetic construct
QVQLQQSDAELVKPGASVKISCKASGYTFTDRTIHWVKQRPEQGLEWIGYIYPGDGSTKYNENFKGKATLTADKSSSTAYMQLNSLTSEDSAVYFCARRGAMDYWGQGTSVTVSSAKTTPPSVYPLAPGSAAQTNSMVTLGCLVKGYFPEPVTVTWNSGSLSSGVHTFPAVLQSDLYTLSSSVTVPSSTWPSETVTCNVAHPASSTKVDKKIVPRDCGCKPCICTVPEVSSVFIFPPKPKDVLTITLTPKVTCVVVDISKDDPEVQFSWFVDDVEVHTAQTQPREEQFNSTFRSVSELPIMHQDWLNGKEFKCRVNSAAFPAPIEKTISKTKGRPKAPQVYTIPPPKEQMAKDKVSLTCMITDFFPEDITVEWQWNGQPAENYKNTQPIMDTDGSYFVYSKLNVQKSNWEAGNTFTCSVLHEGLHNHHTEKSLSHSPGK

SEQ ID NO: 1803 - protein, 115 aa, synthetic construct
QVQLQQSDAELVKPGASVKISCKASGYTFTDRTIHWVKQRPEQGLEWIGYIYPGDGSTKYNENFKGKATLTADKSSSTAYMQLNSLTSEDSAVYFCARRGAMDYWGQGTSVTVSS

SEQ ID NO: 1804 - DNA, 345 bp, synthetic construct
  source 1..345: mol_type = other DNA
caggtgcagctgcagcagagcgacgccgagctggtgaagcccggcgccagcgtgaagatcagctgcaaggccagcggctacaccttcaccgacaggaccatccactgggtgaagcagaggcccgagcagggcctggagtggatcggctacatctaccccggcgacggcagcaccaagtacaacgagaacttcaagggcaaggccaccctgaccgccgacaagagcagcagcaccgcctacatgcagctgaacagcctgaccagcgaggacagcgccgtgtacttctgcgccaggaggggcgcgatggactactggggccagggcaccagcgtgaccgtgagcagc

SEQ ID NO: 1805 - DNA, 345 bp, synthetic construct
  source 1..345: mol_type = other DNA
caggtgcagctgcagcagagcgacgccgagctggtgaagcccggcgccagcgtgaagatcagctgcaaggccagcggctacaccttcaccgaccggaccatccactgggtgaagcagcggcccgagcagggcctggagtggatcggctacatctaccccggcgacggcagcaccaagtacaacgagaacttcaagggcaaggccaccctgaccgccgacaagagcagcagcaccgcctacatgcagctgaacagcctgaccagcgaggacagcgccgtgtacttctgcgcccggcggggcgctatggactactggggccagggcaccagcgtgaccgtgagcagc

SEQ ID NO: 1806 - DNA, 345 bp, synthetic construct
  source 1..345: mol_type = other DNA
caggtgcagctgcagcagagcgacgccgagctggtgaagcccggcgccagcgtgaagatcagctgcaaggccagcggctacaccttcaccgaccgaaccatccactgggtgaagcagcgacccgagcagggcctggagtggatcggctacatctaccccggcgacggcagcaccaagtacaacgagaacttcaagggcaaggccaccctgaccgccgacaagagcagcagcaccgcctacatgcagctgaacagcctgaccagcgaggacagcgccgtgtacttctgcgcccgacgaggcgctatggactactggggccagggcaccagcgtgaccgtgagcagc

SEQ ID NO: 1807 - DNA, 345 bp, synthetic construct
  source 1..345: mol_type = other DNA
caggtgcagctgcagcagagcgatgccgagctggtgaaacctggggccagcgtcaagatcagctgcaaggcctccgggtacaccttcaccgaccgcaccatccactgggtgaagcagcggcccgagcaggggctggagtggatcggctacatctaccccggggacggcagcaccaagtacaacgagaacttcaagggcaaggccaccctgaccgccgacaagtccagcagcacggcctacatgcagctcaacagcctcaccagcgaggacagcgccgtgtacttctgcgcccggcggggcgcaatggactactggggccagggcacctccgtgaccgtgtcctcc

SEQ ID NO: 1808 - DNA, 345 bp, synthetic construct
  source 1..345: mol_type = other DNA
caggtgcagctgcagcagagcgatgccgagctggtgaaacccggggcctccgtcaagatcagctgcaaggccagcgggtacaccttcaccgaccgcaccatccactgggtgaagcagcggcccgagcagggcctggagtggatcggctacatctaccccggggacggcagcaccaagtacaacgagaacttcaagggcaaggccaccctgaccgccgacaagtccagcagcacagcctacatgcagctcaacagcctcacctctgaggacagcgccgtgtacttctgcgcccggcggggcgcgatggactactggggccaggggaccagcgtgaccgtgtcctcc

SEQ ID NO: 1809 - DNA, 345 bp, synthetic construct
  source 1..345: mol_type = other DNA
caggtgcagctgcagcagagcgacgccgagctggtgaaacctggggccagcgtcaagatcagctgcaaggcctccggctacaccttcaccgaccgcaccatccactgggtgaagcagcggcccgagcaggggctggagtggatcgggtacatctaccccggggacggctccaccaagtacaacgagaacttcaagggcaaagccaccctgacggccgacaagtccagcagcaccgcctacatgcagctgaacagcctgaccagcgaggacagcgccgtgtacttctgcgcccggcggggggctatggactactggggccagggcacctccgtgaccgtgtcctcc

SEQ ID NO: 1810 - DNA, 345 bp, synthetic construct
  source 1..345: mol_type = other DNA
caggtgcagctgcagcagtccgacgccgagctggtgaagcccggcgcctccgtgaagatctcctgcaaggcctccggctacaccttcaccgaccggaccatccactgggtgaagcagcggcccgagcagggcctggagtggatcggctacatctaccccggcgacggctccaccaagtacaacgagaacttcaagggcaaggccaccctgaccgccgacaagtcctcctccaccgcctacatgcagctgaactccctgacctccgaggactccgccgtgtacttctgcgcccggcggggcgctatggactactggggccagggcacctccgtgaccgtgtcctcc

SEQ ID NO: 1811 - DNA, 345 bp, synthetic construct
  source 1..345: mol_type = other DNA
caggtgcagctgcagcagtccgatgccgagctggtgaaaccgggggccagcgtcaagatctcatgcaaagcttccggctacaccttcaccgacagaaccatccactgggtgaagcagcggcccgagcaggggctggagtggatcgggtacatctaccccggggacggcagcaccaagtacaacgagaacttcaagggcaaggccaccctgacagccgacaagtccagctccaccgcctacatgcagctcaacagcctgacctccgaggacagcgccgtgtacttctgcgcccggcggggcgcaatggactactggggccagggcaccagcgtgaccgtgagcagc

SEQ ID NO: 1812 - DNA, 345 bp, synthetic construct
  source 1..345: mol_type = other DNA
caggtgcagctgcagcagagcgacgccgagctggtgaagcctggcgccagcgtgaagatcagctgcaaggccagcggctacaccttcaccgaccgtaccatccactgggtgaagcagcgacctgagcagggcctggagtggatcggctacatctaccctggcgacggcagcaccaagtacaacgagaacttcaagggcaaggccaccctgaccgccgacaagagcagcagcaccgcctacatgcagctgaacagcctgaccagcgaggacagcgccgtgtacttctgcgcccgtcgaggcgctatggactactggggccagggcaccagcgtgaccgtgagcagc

SEQ ID NO: 1813 - DNA, 345 bp, synthetic construct
  source 1..345: mol_type = other DNA
caggtgcagctgcagcagagcgacgccgagctggtgaagcctggcgccagcgtgaagatcagctgcaaggccagcggctacaccttcaccgaccgtaccatccactgggtgaagcagcgacctgagcagggcctggagtggatcggctacatctaccccggcgacggcagcaccaagtacaacgagaacttcaagggcaaggccaccctgaccgccgacaagagcagcagcaccgcctacatgcagctgaacagcctgaccagcgaggacagcgccgtgtacttctgcgcccggcggggcgctatggactactggggccagggcaccagcgtgaccgtgagcagc

SEQ ID NO: 1814 - protein, 439 aa, synthetic construct
QVQLQQSDAELVKPGASVKISCKASGYTFTDRTIHWVKQRPEQGLEWIGYIYPGDDSTKYNDMFKAKATLTADKSSNTAYMQLNSLTSDDSAVYFCARRGTMDYWGQGTSVTVSSAKTTPPSVYPLAPGSAAQTNSMVTLGCLVKGYFPEPVTVTWNSGSLSSGVHTFPAVLQSDLYTLSSSVTVPSSTWPSETVTCNVAHPASSTKVDKKIVPRDCGCKPCICTVPEVSSVFIFPPKPKDVLTITLTPKVTCVVVDISKDDPEVQFSWFVDDVEVHTAQTQPREEQFNSTFRSVSELPIMHQDWLNGKEFKCRVNSAAFPAPIEKTISKTKGRPKAPQVYTIPPPKEQMAKDKVSLTCMITDFFPEDITVEWQWNGQPAENYKNTQPIMDTDGSYFVYSKLNVQKSNWEAGNTFTCSVLHEGLHNHHTEKSLSHSPGK

SEQ ID NO: 1815 - protein, 439 aa, synthetic construct
QVQLQQSDAELVNPGASVKISCKASGYTFTDRTIHWVKQRPEQGLEWIGYIYPGDGSTKYNENFKGKATLTADKSSSTAYMQLNSLASEDSAVYFCARRGAMDYWGQGTSVTVSSAKTTPPSVYPLAPGSAAQTNSMVTLGCLVKGYFPEPVTVTWNSGSLSSGVHTFPAVLQSDLYTLSSSVTVPSSTWPSETVTCNVAHPASSTKVDKKIVPRDCGCKPCICTVPEVSSVFIFPPKPKDVLTITLTPKVTCVVVDISKDDPEVQFSWFVDDVEVHTAQTQPREEQFNSTFRSVSELPIMHQDWLNGKEFKCRVNSAAFPAPIEKTISKTKGRPKAPQVYTIPPPKEQMAKDKVSLTCMITDFFPEDITVEWQWNGQPAENYKNTQPIMDTDGSYFVYSKLNVQKSNWEAGNTFTCSVLHEGLHNHHTEKSLSHSPGK

SEQ ID NO: 1816 - protein, 451 aa, synthetic construct
QVQLQQSGAELVRPGASVTLSCKASGNTFTDYEIHWVKQTPVHGLEWIGAIDPETGNTAYNQKFKGKARLTADKSSSTAYMELRSLTSEDSAVYYCTRSRGFDYWGQGTTLTVSSAKTTPPSVYPLAPGCGDTTGSSVTLGCLVKGYFPESVTVTWNSGSLSSSVHTFPALLQSGLYTMSSSVTVPSSTWPSQTVTCSVAHPASSTTVDKKLEPSGPISTINPCPPCKECHKCPAPNLEGGPSVFIFPPNIKDVLMISLTPKVTCVVVDVSEDDPDVRISWFVNNVEVHTAQTQTHREDYNSTIRVVSALPIQHQDWMSGKEFKCKVNNKDLPSPIERTISKIKGLVRAPQVYILPPPAEQLSRKDVSLTCLVVGFNPGDISVEWTSNGHTEENYKDTAPVLDSDGSYFIYSKLDIKTSKWEKTDSFSCNVRHEGLKNYYLKKTISRSPGK

SEQ ID NO: 1817 - protein, 444 aa, synthetic construct
QVQLVQSGAEVVKPGASVKISCKASGYTFTDRTIHWVRQAPGQGLEWIGYIYPGDGSTKYSQKFQGRATLTADTSASTAYMELSSLRSEDTAVYYCARRGAMDYWGQGTSVTVSSASTKGPSVFPLAPSSKSTSGGTAALGCLVKDYFPEPVTVSWNSGALTSGVHTFPAVLQSSGLYSLSSVVTVPSSSLGTQTYICNVNHKPSNTKVDKRVEPKSCDKTHTCPPCPAPELLGGPSVFLFPPKPKDTLMISRTPEVTCVVVDVSHEDPEVKFNWYVDGVEVHNAKTKPREEQYNSTYRVVSVLTVLHQDWLNGKEYKCKVSNKALPAPIEKTISKAKGQPREPQVYTLPPSREEMTKNQVSLTCLVKGFYPSDIAVEWESNGQPENNYKTTPPVLDSDGSFFLYSKLTVDKSRWQQGNVFSCSVMHEALHNHYTQKSLSLSPG

SEQ ID NO: 1818 - DNA, 351 bp, synthetic construct
  source 1..351: mol_type = other DNA
gaggtgcagttggtggagtctggggaagacttagtgaagcctggagggtccctgaaactctcctgtgtcgcttctggattcgctttcagtagctatggcatgtcttgggttcgccagactccagacatgaggctggagtgggtcgcaacaattagtagcagtggtagtcgcacctactttccagacagtgtgaaggggcgactcaccatctccagagacaatgacaagaacatcctatacctacaaatgagcagtctgaggtctgaggacacagccatgtactattgtacgattacctgggacggtgctatggactactggggtcgtggaatatcagtcaccgtctcctca

SEQ ID NO: 1819 - protein, 117 aa, synthetic construct
EVQLVESGEDLVKPGGSLKLSCVASGFAFSSYGMSWVRQTPDMRLEWVATISSSGSRTYFPDSVKGRLTISRDNDKNILYLQMSSLRSEDTAMYYCTITWDGAMDYWGRGISVTVSS

SEQ ID NO: 1820 - DNA, 1377 bp, synthetic construct
  source 1..1377: mol_type = other DNA
atgaacttcgggctcagcttgattttccttgtccttgttttaaaaggtgtccagtgtgaggttcatctggtggagtctgggggagccttagtgaagcctggagggtccctgaaactctcctgtgcagcctctggattcagtttcagtaaatatggcatgtcttgggttcgccagactccagacaagaggctggagtgggtcgcaaccattagtagtagtgggagtcgcacctactatccagacagtgtgaagggccaattcaccatctccagagacaatgccaagaacaccctgtacctgcaaatgagcagtctgaagtctgaggacacagccatgtattactgttcaattagctgggacggtgctatggactactggggtcaagggacctcagtcaccgtctcctcagccaaaacgacacccccatctgtctatccactggcccctggatctgctgcccaaactaactccatggtgaccctgggatgcctggtcaagggctatttccctgagccagtgacagtgacctggaactctggatccctgtccagcggtgtgcacaccttcccagctgtcctgcagtctgacctctacactctgagcagctcagtgactgtcccctccagcacctggcccagcgagaccgtcacctgcaacgttgcccacccggccagcagcaccaaggtggacaagaaaattgtgcccagggattgtggttgtaagccttgcatatgtacagtcccagaagtatcatctgtcttcatcttccccccaaagcccaaggatgtgctcaccattactctgactcctaaggtcacgtgtgttgtggtagacatcagcaaggatgatcccgaggtccagttcagctggtttgtagatgatgtggaggtgcacacagctcagacgcaaccccgggaggagcagttcaacagcactttccgctcagtcagtgaacttcccatcatgcaccaggactggctcaatggcaaggagttcaaatgcagggtcaacagtgcagctttccctgcccccatcgagaaaaccatctccaaaaccaaaggcagaccgaaggctccacaggtgtacaccattccacctcccaaggagcagatggccaaggataaagtcagtctgacctgcatgataacagacttcttccctgaagacattactgtggagtggcagtggaatgggcagccagcggagaactacaagaacactcagcccatcatggacacagatggctcttacttcgtctacagcaagctcaatgtgcagaagagcaactgggaggcaggaaatactttcacctgctctgtgttacatgagggcctgcacaaccaccatactgagaagagcctctcccactctcctggt

SEQ ID NO: 1821 - DNA, 351 bp, synthetic construct
  source 1..351: mol_type = other DNA
gaggttcatctggtggagtctgggggagccttagtgaagcctggagggtccctgaaactctcctgtgcagcctctggattcagtttcagtaaatatggcatgtcttgggttcgccagactccagacaagaggctggagtgggtcgcaaccattagtagtagtgggagtcgcacctactatccagacagtgtgaagggccaattcaccatctccagagacaatgccaagaacaccctgtacctgcaaatgagcagtctgaagtctgaggacacagccatgtattactgttcaattagctgggacggtgctatggactactggggtcaagggacctcagtcaccgtctcctca

SEQ ID NO: 1822 - protein, 117 aa, synthetic construct
EVHLVESGGALVKPGGSLKLSCAASGFSFSKYGMSWVRQTPDKRLEWVATISSSGSRTYYPDSVKGQFTISRDNAKNTLYLQMSSLKSEDTAMYYCSISWDGAMDYWGQGTSVTVSS

SEQ ID NO: 1823 - protein, 30 aa, synthetic construct
  VARIANT 3: note = Any amino acid
EVXLVESGGALVKPGGSLRLSCAASGFSFS

SEQ ID NO: 1824 - DNA, 351 bp, synthetic construct
  source 1..351: mol_type = other DNA
gaggttcatctggtggagtctgggggagccttagtgaagcctggagggtccctgagactctcctgtgcagcctctggattcagtttcagtaaatatggcatgtcttgggttcgccaggccccaggcaagggcctggagtgggtcgcaaccattagtagtagtgggagtcgcacctactatccagacagtgtgaagggcagattcaccatctccagagacaatgccaagaacaccctgtacctgcaaatgagcagtctgaagtctgaggacacagccatgtattactgttcaattagctgggacggtgctatggactactggggtcaagggacctcagtcaccgtctcctca

SEQ ID NO: 1825 - protein, 117 aa, synthetic construct
EVHLVESGGALVKPGGSLRLSCAASGFSFSKYGMSWVRQAPGKGLEWVATISSSGSRTYYPDSVKGRFTISRDNAKNTLYLQMSSLKSEDTAMYYCSISWDGAMDYWGQGTSVTVSS

SEQ ID NO: 1826 - DNA, 351 bp, synthetic construct
  source 1..351: mol_type = other DNA
gaggttcatctggtggagtctgggggagccttagtgaagcctggagggtccctgagactctcctgtgcagcctctggattcagtttcagtaaatatggcatgtcttgggttcgccaggccccaggcaagggcctggagtgggtcgcaaccattagtagtagtgggagtcgcacctactatccagacagtgtgaagggcagattcaccatctccagagacaatgccaagaacaccctgtacctgcaaatgaacagtctgagagccgaggacacagccatgtattactgttcaattagctgggacggtgctatggactactggggtcaagggaccaccgtcaccgtctcctca

SEQ ID NO: 1827 - protein, 117 aa, synthetic construct
EVHLVESGGALVKPGGSLRLSCAASGFSFSKYGMSWVRQAPGKGLEWVATISSSGSRTYYPDSVKGRFTISRDNAKNTLYLQMNSLRAEDTAMYYCSISWDGAMDYWGQGTTVTVSS

SEQ ID NO: 1828 - DNA, 351 bp, synthetic construct
  source 1..351: mol_type = other DNA
gaggttcagctggtggagtctgggggagccttagtgaagcctggagggtccctgagactctcctgtgcagcctctggattcagtttcagtaaatatggcatgtcttgggttcgccaggccccaggcaagggcctggagtgggtcgcaaccattagtagtagtgggagtcgcacctactatccagacagtgtgaagggcagattcaccatctccagagacaatgccaagaacaccctgtacctgcaaatgaacagtctgagagccgaggacacagccatgtattactgttcaattagctgggacggtgctatggactactggggtcaagggaccaccgtcaccgtctcctca

SEQ ID NO: 1829 - protein, 117 aa, synthetic construct
EVQLVESGGALVKPGGSLRLSCAASGFSFSKYGMSWVRQAPGKGLEWVATISSSGSRTYYPDSVKGRFTISRDNAKNTLYLQMNSLRAEDTAMYYCSISWDGAMDYWGQGTTVTVSS

SEQ ID NO: 1830 - DNA, 351 bp, synthetic construct
  source 1..351: mol_type = other DNA
gaggttcagctggtggagtctgggggagccttagtgaagcctggagggtccctgagactctcctgtgcagcctctggattcagtttcagtaaatatggcatgtcttgggttcgccaggccccaggcaagggcctggagtgggtcgcaaccattagtagtagtgggagtcgcacctactatccagacagtgtgaagggcagattcaccatctccagagacaatgccaagaacaccctgtacctgcaaatgaacagtctgagagccgaggacacagccatgtattactgtgccattagctgggacggtgctatggactactggggtcaagggaccaccgtcaccgtctcctca

SEQ ID NO: 1831 - protein, 117 aa, synthetic construct
EVQLVESGGALVKPGGSLRLSCAASGFSFSKYGMSWVRQAPGKGLEWVATISSSGSRTYYPDSVKGRFTISRDNAKNTLYLQMNSLRAEDTAMYYCAISWDGAMDYWGQGTTVTVSS

SEQ ID NO: 1832 - DNA, 1374 bp, synthetic construct
  source 1..1374: mol_type = other DNA
atggaatggacctgggtctttctcttcctcctgtcagtaactgcaggtgtccactcccaggttcagctgcagcagtctggagctgagctgatgaagcctggggcctcagtgaagatatcctgcaaggctactggctacacattcagtaactactggatagagtgggtaaagcagaggcctggacatggccttgagtggattggagagattttacctggaagtgatagtattaagtacaatgagaatttcaagggcaaggccacattcactgcagatacatcctccaacacagcctacatgcaactcagcagcctgacatctgaggactctgccgtctattactgtgcaagaagggggaactacccagactactggggccaaggcaccactctcacagtctcctcagccaaaacgacacccccatctgtctatccactggcccctggatctgctgcccaaactaactccatggtgaccctgggatgcctggtcaagggctatttccctgagccagtgacagtgacctggaactctggatccctgtccagcggtgtgcacaccttcccagctgtcctgcagtctgacctctacactctgagcagctcagtgactgtcccctccagcacctggcccagcgagaccgtcacctgcaacgttgcccacccggccagcagcaccaaggtggacaagaaaattgtgcccagggattgtggttgtaagccttgcatatgtacagtcccagaagtatcatctgtcttcatcttccccccaaagcccaaggatgtgctcaccattactctgactcctaaggtcacgtgtgttgtggtagacatcagcaaggatgatcccgaggtccagttcagctggtttgtagatgatgtggaggtgcacacagctcagacgcaaccccgggaggagcagttcaacagcactttccgctcagtcagtgaacttcccatcatgcaccaggactggctcaatggcaaggagttcaaatgcagggtcaacagtgcagctttccctgcccccatcgagaaaaccatctccaaaaccaaaggcagaccgaaggctccacaggtgtacaccattccacctcccaaggagcagatggccaaggataaagtcagtctgacctgcatgataacagacttcttccctgaagacattactgtggagtggcagtggaatgggcagccagcggagaactacaagaacactcagcccatcatggacacagatggctcttacttcgtctacagcaagctcaatgtgcagaagagcaactgggaggcaggaaatactttcacctgctctgtgttacatgagggcctgcacaaccaccatactgagaagagcctctcccactctcctggt

SEQ ID NO: 1833 - DNA, 1326 bp, synthetic construct
  source 1..1326: mol_type = other DNA
gaggtgcagctggtgcagtctggagcagaggtgaaaaagcccggggagtctctgaagatctcctgtaagggttctggctacacattcagtaactactggatagagtgggtgcgccagatgcccgggaaaggcctggagtggatgggggagattttacctggaagtgatagtattaagtacgaaaagaatttcaagggccaggtcaccatctcagccgacaagtccatcagcaccgcctacctgcagtggagcagcctgaaggcctcggacaccgccatgtattactgtgcgagaagggggaactacgtggacgactggggccagggcaccctggtcaccgtctcctcagcttctaccaagggcccatcggtcttcccgctagcgccctgctccaggagcacctccgagagcacagccgccctgggctgcctggtcaaggactacttccccgaaccggtgacggtgtcgtggaactcaggcgccctgaccagcggcgtgcacaccttcccggctgtcctacagtcctcaggactctactccctcagcagcgtggtgaccgtgccctccagcagcttgggcacgaagacctacacctgcaacgtagatcacaagcccagcaacaccaaggtggacaagagagttgagtccaaatatggtcccccatgcccaccctgcccagcacctgaggccgccgggggaccatcagtcttcctgttccccccaaaacccaaggacactctcatgatctcccggacccctgaggtcacgtgcgtggtggtggacgtgagccaggaagaccccgaggtccagttcaactggtacgtggatggcgtggaggtgcataatgccaagacaaagccgcgggaggagcagttcaacagcacgtaccgtgtggtcagcgtcctcaccgtcctgcaccaggactggctgaacggcaaggagtacaagtgcaaggtctccaacaaaggcctcccgtcctccatcgagaaaaccatctccaaagccaaagggcagccccgagagccacaggtgtacaccctgcccccatcccaggaggagatgaccaagaaccaggtcagcctgacctgcctggtcaaaggcttctaccccagcgacatcgccgtggagtgggaaagcaatgggcagccggagaacaactacaagaccacgcctcccgtgctggactccgacggctccttcttcctctacagcaggctaaccgtggacaagagcaggtggcaggaggggaatgtcttctcatgctccgtgatgcatgaggctctgcacaaccactacacacagaagagcctctccctgtctctgggt

SEQ ID NO: 1834 - protein, 458 aa, synthetic construct
MEWTWVFLFLLSVTAGVHSQVQLQQSGAELMKPGASVKISCKATGYTFSNYWIEWVKQRPGHGLEWIGEILPGSDSIKYNENFKGKATFTADTSSNTAYMQLSSLTSEDSAVYYCARRGNYPDYWGQGTTLTVSSAKTTPPSVYPLAPGSAAQTNSMVTLGCLVKGYFPEPVTVTWNSGSLSSGVHTFPAVLQSDLYTLSSSVTVPSSTWPSETVTCNVAHPASSTKVDKKIVPRDCGCKPCICTVPEVSSVFIFPPKPKDVLTITLTPKVTCVVVDISKDDPEVQFSWFVDDVEVHTAQTQPREEQFNSTFRSVSELPIMHQDWLNGKEFKCRVNSAAFPAPIEKTISKTKGRPKAPQVYTIPPPKEQMAKDKVSLTCMITDFFPEDITVEWQWNGQPAENYKNTQPIMDTDGSYFVYSKLNVQKSNWEAGNTFTCSVLHEGLHNHHTEKSLSHSPG

SEQ ID NO: 1835 - protein, 442 aa, synthetic construct
EVQLVQSGAEVKKPGESLKISCKGSGYTFSNYWIEWVRQMPGKGLEWMGEILPGSDSIKYEKNFKGQVTISADKSISTAYLQWSSLKASDTAMYYCARRGNYVDDWGQGTLVTVSSASTKGPSVFPLAPCSRSTSESTAALGCLVKDYFPEPVTVSWNSGALTSGVHTFPAVLQSSGLYSLSSVVTVPSSSLGTKTYTCNVDHKPSNTKVDKRVESKYGPPCPPCPAPEAAGGPSVFLFPPKPKDTLMISRTPEVTCVVVDVSQEDPEVQFNWYVDGVEVHNAKTKPREEQFNSTYRVVSVLTVLHQDWLNGKEYKCKVSNKGLPSSIEKTISKAKGQPREPQVYTLPPSQEEMTKNQVSLTCLVKGFYPSDIAVEWESNGQPENNYKTTPPVLDSDGSFFLYSRLTVDKSRWQEGNVFSCSVMHEALHNHYTQKSLSLSLG

SEQ ID NO: 1836 - protein, 116 aa, synthetic construct
EVQLVQSGAEVKKPGESLKISCKGSGYTFSNYWIEWVRQMPGKGLEWMGEILPGSDSIKYEKNFKGQVTISADKSISTAYLQWSSLKASDTAMYYCARRGNYVDDWGQGTLVTVSS

SEQ ID NO: 1837 - DNA, 1320 bp, synthetic construct
  source 1..1320: mol_type = other DNA
gaggtccagctgcaacagtctggacctgagctggtgaagcctggggcttcagtgaagatatcctgcaagacttctggatacacattcactgaatacaccatacactgggtgaagcagagccatggagagagccttgagtggattggaggtattaatccaaacgatggtggtactatttacaaccagaagttcaagggcaaggccacattgactgtagacaagtcctccaaaacagcctacatggagctccgcagcctgacatctgaggattctgcagtcttttactgtgcaagagggccctccgccaggtttccttactggggccaagggactctggtcactgtctctgcagccaaaacgacacccccatctgtctatccactggcccctggatctgctgcccaaactaactccatggtgaccctgggatgcctggtcaagggctatttccctgagccagtgacagtgacctggaactctggatccctgtccagcggtgtgcacaccttcccagctgtcctgcagtctgacctctacactctgagcagctcagtgactgtcccctccagcacctggcccagcgagaccgtcacctgcaacgttgcccacccggccagcagcaccaaggtggacaagaaaattgtgcccagggattgtggttgtaagccttgcatatgtacagtcccagaagtatcatctgtcttcatcttccccccaaagcccaaggatgtgctcaccattactctgactcctaaggtcacgtgtgttgtggtagacatcagcaaggatgatcccgaggtccagttcagctggtttgtagatgatgtggaggtgcacacagctcagacgcaaccccgggaggagcagttcaacagcactttccgctcagtcagtgaacttcccatcatgcaccaggactggctcaatggcaaggagttcaaatgcagggtcaacagtgcagctttccctgcccccatcgagaaaaccatctccaaaaccaaaggcagaccgaaggctccacaggtgtacaccattccacctcccaaggagcagatggccaaggataaagtcagtctgacctgcatgataacagacttcttccctgaagacattactgtggagtggcagtggaatgggcagccagcggagaactacaagaacactcagcccatcatggacacagatggctcttacttcgtctacagcaagctcaatgtgcagaagagcaactgggaggcaggaaatactttcacctgctctgtgttacatgagggcctgcacaaccaccatactgagaagagcctctcccactctcctggt

SEQ ID NO: 1838 - DNA, 1377 bp, synthetic construct
  source 1..1377: mol_type = other DNA
atgggatggagctggatctttctctttctcctgtcaggaactacaggtgtcctctctgaggtccagctgcaacagtctggacctgagctggtgaagcctggggcttcagtgaagatatcctgcaagacttctggatacacattcactgaatacaccatacactgggtgaagcagagccatggagagagccttgagtggattggaggtattaatccaaacgatggtggtactatttacaaccagaagttcaagggcaaggccacattgactgtagacaagtcctccaaaacagcctacatggagctccgcagcctgacatctgaggattctgcagtcttttactgtgcaagagggccctccgccaggtttccttactggggccaagggactctggtcactgtctctgcagccaaaacgacacccccatctgtctatccactggcccctggatctgctgcccaaactaactccatggtgaccctgggatgcctggtcaagggctatttccctgagccagtgacagtgacctggaactctggatccctgtccagcggtgtgcacaccttcccagctgtcctgcagtctgacctctacactctgagcagctcagtgactgtcccctccagcacctggcccagcgagaccgtcacctgcaacgttgcccacccggccagcagcaccaaggtggacaagaaaattgtgcccagggattgtggttgtaagccttgcatatgtacagtcccagaagtatcatctgtcttcatcttccccccaaagcccaaggatgtgctcaccattactctgactcctaaggtcacgtgtgttgtggtagacatcagcaaggatgatcccgaggtccagttcagctggtttgtagatgatgtggaggtgcacacagctcagacgcaaccccgggaggagcagttcaacagcactttccgctcagtcagtgaacttcccatcatgcaccaggactggctcaatggcaaggagttcaaatgcagggtcaacagtgcagctttccctgcccccatcgagaaaaccatctccaaaaccaaaggcagaccgaaggctccacaggtgtacaccattccacctcccaaggagcagatggccaaggataaagtcagtctgacctgcatgataacagacttcttccctgaagacattactgtggagtggcagtggaatgggcagccagcggagaactacaagaacactcagcccatcatggacacagatggctcttacttcgtctacagcaagctcaatgtgcagaagagcaactgggaggcaggaaatactttcacctgctctgtgttacatgagggcctgcacaaccaccatactgagaagagcctctcccactctcctggt

SEQ ID NO: 1839 - DNA, 351 bp, synthetic construct
  source 1..351: mol_type = other DNA
gaggtccagctgcaacagtctggacctgagctggtgaagcctggggcttcagtgaagatatcctgcaagacttctggatacacattcactgaatacaccatacactgggtgaagcagagccatggagagagccttgagtggattggaggtattaatccaaacgatggtggtactatttacaaccagaagttcaagggcaaggccacattgactgtagacaagtcctccaaaacagcctacatggagctccgcagcctgacatctgaggattctgcagtcttttactgtgcaagagggccctccgccaggtttccttactggggccaagggactctggtcactgtctctgca

SEQ ID NO: 1840 - DNA, 699 bp, synthetic construct
  source 1..699: mol_type = other DNA
atgggatggagctggatctttctctttctcctgtcaggaactacaggtgtcctctctgaggtccagctgcaacagtctggacctgagctggtgaagcctggggcttcagtgaagatatcctgcaagacttctggatacacattcactgaatacaccatacactgggtgaagcagagccatggagagagccttgagtggattggaggtattaatccaaacgatggtggtactatttacaaccagaagttcaagggcaaggccacattgactgtagacaagtcctccaaaacagcctacatggagctccgcagcctgacatctgaggattctgcagtcttttactgtgcaagagggccctccgccaggtttccttactggggccaagggactctggtcactgtctctgcagccaaaacgacacccccatctgtctatccactggcccctggatctgctgcccaaactaactccatggtgaccctgggatgcctggtcaagggctatttccctgagccagtgacagtgacctggaactctggatccctgtccagcggtgtgcacaccttcccagctgtcctgcagtctgacctctacactctgagcagctcagtgactgtcccctccagcacctggcccagcgagaccgtcacctgcaacgttgcccacccggccagcagcaccaaggtggacaagaaaatt

SEQ ID NO: 1841 - DNA, 717 bp, synthetic construct
  source 1..717: mol_type = other DNA
atgggatggagctggatctttctctttctcctgtcaggaactacaggtgtcctctctgaggtccagctgcaacagtctggacctgagctggtgaagcctggggcttcagtgaagatatcctgcaagacttctggatacacattcactgaatacaccatacactgggtgaagcagagccatggagagagccttgagtggattggaggtattaatccaaacgatggtggtactatttacaaccagaagttcaagggcaaggccacattgactgtagacaagtcctccaaaacagcctacatggagctccgcagcctgacatctgaggattctgcagtcttttactgtgcaagagggccctccgccaggtttccttactggggccaagggactctggtcactgtctctgcagccaaaacgacacccccatctgtctatccactggcccctggatctgctgcccaaactaactccatggtgaccctgggatgcctggtcaagggctatttccctgagccagtgacagtgacctggaactctggatccctgtccagcggtgtgcacaccttcccagctgtcctgcagtctgacctctacactctgagcagctcagtgactgtcccctccagcacctggcccagcgagaccgtcacctgcaacgttgcccacccggccagcagcaccaaggtggacaagaaaattgtgcccagggattgtggt

SEQ ID NO: 1842 - DNA, 744 bp, synthetic construct
  source 1..744: mol_type = other DNA
atgggatggagctggatctttctctttctcctgtcaggaactacaggtgtcctctctgaggtccagctgcaacagtctggacctgagctggtgaagcctggggcttcagtgaagatatcctgcaagacttctggatacacattcactgaatacaccatacactgggtgaagcagagccatggagagagccttgagtggattggaggtattaatccaaacgatggtggtactatttacaaccagaagttcaagggcaaggccacattgactgtagacaagtcctccaaaacagcctacatggagctccgcagcctgacatctgaggattctgcagtcttttactgtgcaagagggccctccgccaggtttccttactggggccaagggactctggtcactgtctctgcagccaaaacgacacccccatctgtctatccactggcccctggatctgctgcccaaactaactccatggtgaccctgggatgcctggtcaagggctatttccctgagccagtgacagtgacctggaactctggatccctgtccagcggtgtgcacaccttcccagctgtcctgcagtctgacctctacactctgagcagctcagtgactgtcccctccagcacctggcccagcgagaccgtcacctgcaacgttgcccacccggccagcagcaccaaggtggacaagaaaattgtgcccagggattgtggttgtaagccttgcatatgtacagtccca

SEQ ID NO: 1843 - DNA, 753 bp, synthetic construct
  source 1..753: mol_type = other DNA
atgggatggagctggatctttctctttctcctgtcaggaactacaggtgtcctctctgaggtccagctgcaacagtctggacctgagctggtgaagcctggggcttcagtgaagatatcctgcaagacttctggatacacattcactgaatacaccatacactgggtgaagcagagccatggagagagccttgagtggattggaggtattaatccaaacgatggtggtactatttacaaccagaagttcaagggcaaggccacattgactgtagacaagtcctccaaaacagcctacatggagctccgcagcctgacatctgaggattctgcagtcttttactgtgcaagagggccctccgccaggtttccttactggggccaagggactctggtcactgtctctgcagccaaaacgacacccccatctgtctatccactggcccctggatctgctgcccaaactaactccatggtgaccctgggatgcctggtcaagggctatttccctgagccagtgacagtgacctggaactctggatccctgtccagcggtgtgcacaccttcccagctgtcctgcagtctgacctctacactctgagcagctcagtgactgtcccctccagcacctggcccagcgagaccgtcacctgcaacgttgcccacccggccagcagcaccaaggtggacaagaaaattgtgcccagggattgtggttgtaagccttgcatatgtacagtcccagaagtatca

SEQ ID NO: 1844 - protein, 459 aa, synthetic construct
MGWSWIFLFLLSGTTGVLSEVQLQQSGPELVKPGASVKISCKTSGYTFTEYTIHWVKQSHGESLEWIGGINPNDGGTIYNQKFKGKATLTVDKSSKTAYMELRSLTSEDSAVFYCARGPSARFPYWGQGTLVTVSAAKTTPPSVYPLAPGSAAQTNSMVTLGCLVKGYFPEPVTVTWNSGSLSSGVHTFPAVLQSDLYTLSSSVTVPSSTWPSETVTCNVAHPASSTKVDKKIVPRDCGCKPCICTVPEVSSVFIFPPKPKDVLTITLTPKVTCVVVDISKDDPEVQFSWFVDDVEVHTAQTQPREEQFNSTFRSVSELPIMHQDWLNGKEFKCRVNSAAFPAPIEKTISKTKGRPKAPQVYTIPPPKEQMAKDKVSLTCMITDFFPEDITVEWQWNGQPAENYKNTQPIMDTDGSYFVYSKLNVQKSNWEAGNTFTCSVLHEGLHNHHTEKSLSHSPG

SEQ ID NO: 1845 - DNA, 1383 bp, synthetic construct
  source 1..1383: mol_type = other DNA
atgggatggagctggatctttctctttctcctgtcaggaactacaggtgtcctctctgctgccgaggtccagctgcaacagtctggacctgagctggtgaagcctggggcttcagtgaagatatcctgcaagacttctggatacacattcactgaatacaccatacactgggtgaagcagagccatggagagagccttgagtggattggaggtattaatccaaacgatggtggtactatttacaaccagaagttcaagggcaaggccacattgactgtagacaagtcctccaaaacagcctacatggagctccgcagcctgacatctgaggattctgcagtcttttactgtgcaagagggccctccgccaggtttccttactggggccaagggactctggtcactgtctctgcagccaaaacgacacccccatctgtctatccactggcccctggatctgctgcccaaactaactccatggtgaccctgggatgcctggtcaagggctatttccctgagccagtgacagtgacctggaactctggatccctgtccagcggtgtgcacaccttcccagctgtcctgcagtctgacctctacactctgagcagctcagtgactgtcccctccagcacctggcccagcgagaccgtcacctgcaacgttgcccacccggccagcagcaccaaggtggacaagaaaattgtgcccagggattgtggttgtaagccttgcatatgtacagtcccagaagtatcatctgtcttcatcttccccccaaagcccaaggatgtgctcaccattactctgactcctaaggtcacgtgtgttgtggtagacatcagcaaggatgatcccgaggtccagttcagctggtttgtagatgatgtggaggtgcacacagctcagacgcaaccccgggaggagcagttcaacagcactttccgctcagtcagtgaacttcccatcatgcaccaggactggctcaatggcaaggagttcaaatgcagggtcaacagtgcagctttccctgcccccatcgagaaaaccatctccaaaaccaaaggcagaccgaaggctccacaggtgtacaccattccacctcccaaggagcagatggccaaggataaagtcagtctgacctgcatgataacagacttcttccctgaagacattactgtggagtggcagtggaatgggcagccagcggagaactacaagaacactcagcccatcatggacacagatggctcttacttcgtctacagcaagctcaatgtgcagaagagcaactgggaggcaggaaatactttcacctgctctgtgttacatgagggcctgcacaaccaccatactgagaagagcctctcccactctcctggt

SEQ ID NO: 1846 - DNA, 357 bp, synthetic construct
  source 1..357: mol_type = other DNA
caggttcagctgcagcagtctggaactgagctgatgaagcctggggcctcagtgaagatatcctgcaaggctactggctacacattcagtagctcctggatggggtgggttaagcagaggcctggacatggccttgagtggattggagacattttacctggaagtggtggtactaactacaatgagaggttcaagggcaaggcctcattcactgcagaaacatcctccaacacagcctacatgcaactcagcagcctgacatctgaggactctgccgtctattactgtgtaagaagctactatgattacgaccgctttgctaactggggccaagggactctggtcactgtctctgca

SEQ ID NO: 1847 - protein, 119 aa, synthetic construct
QVQLQQSGTELMKPGASVKISCKATGYTFSSSWMGWVKQRPGHGLEWIGDILPGSGGTNYNERFKGKASFTAETSSNTAYMQLSSLTSEDSAVYYCVRSYYDYDRFANWGQGTLVTVSA

SEQ ID NO: 1848 - DNA, 354 bp, synthetic construct
  source 1..354: mol_type = other DNA
gaagtgaagctggtggagtctgggggagacttagtgaagcctggagggtccctgaaactctcctgtgcagcctctggattcactttcagtagctatgccatgtcttgggttcgccagaatccagagaagaggctggagtgggtcgcatccattagtaagggtggtaacacctactatccaaacagcgtgaagggccgattcaccatctccagagataatgccaggaacatcctgtacctgcaaatgagcagtctgaggtctgaggacacggccctttattactgtgcaagaggctggggtgattacgggtggtttgcttactggggccaagtgactctggtcactgtctctgca

SEQ ID NO: 1849 - protein, 118 aa, synthetic construct
EVKLVESGGDLVKPGGSLKLSCAASGFTFSSYAMSWVRQNPEKRLEWVASISKGGNTYYPNSVKGRFTISRDNARNILYLQMSSLRSEDTALYYCARGWGDYGWFAYWGQVTLVTVSA

SEQ ID NO: 1850 - DNA, 354 bp, synthetic construct
  source 1..354: mol_type = other DNA
gaagtgaaactggtggaaagcggcggcgatctggtgaaaccgggcggcagcctgaaactgagctgcgcggcgagcggctttacctttagcagctatgcgatgagctgggtgcgccagaacccggaaaaacgcctggaatgggtggcgagcattagcaaaggcggcaacacctattatccgaacagcgtgaaaggccgctttaccattagccgcgataacgcgcgcaacattctgtatctgcagatgagcagcctgcgcagcgaagataccgcgctgtattattgcgcgcgcggctggggcgattatggctggtttgcgtattggggccaggtgaccctggtgaccgtgagcgcg

SEQ ID NO: 1851 - DNA, 354 bp, synthetic construct
  source 1..354: mol_type = other DNA
gaggtgaagctggtggagagcggaggagacctggtcaagcccgggggctccctgaagctcagctgtgccgccagcggcttcaccttctcctcctatgccatgtcctgggtccggcagaaccctgagaagaggctggagtgggtggcctccatctccaagggcggcaacacctactatcccaacagcgtgaaaggaagatttaccatcagccgggacaatgccaggaacatcctctacctgcagatgagcagcctgcggtctgaggacacagccctgtactactgcgcccggggctggggggactatggatggtttgcctactggggccaggtgaccctggttactgtgtctgcc

SEQ ID NO: 1852 - DNA, 354 bp, synthetic construct
  source 1..354: mol_type = other DNA
gaggtgaagctggtggagagcggcggcgacctggtgaagcccggcggcagcctgaagctgagctgcgccgccagcggcttcaccttcagcagctacgccatgagctgggtgaggcagaaccccgagaagaggctggagtgggtggccagcatcagcaagggcggcaacacctactaccccaacagcgtgaagggcaggttcaccatcagcagggacaacgccaggaacatcctgtacctgcagatgagcagcctgaggagcgaggacaccgccctgtactactgcgccaggggctggggcgactacggctggttcgcctactggggccaggtgaccctggtgaccgtgagcgcc

SEQ ID NO: 1853 - DNA, 354 bp, synthetic construct
  source 1..354: mol_type = other DNA
gaggtgaaacttgtggagagcggcggggacctggtcaagccaggcggcagcctgaagctgagctgtgccgcctccggcttcaccttcagcagctatgccatgtcctgggtccggcagaaccctgagaagaggctggagtgggtggccagcatcagcaaaggaggcaacacctactatcccaacagcgtgaagggccgcttcaccatctcccgggacaatgccaggaacatcctctacctgcagatgagctccctgcggtctgaggacacagccctgtactactgcgcccggggctggggagactatggatggtttgcctactggggccaggtgaccctggtgacagtgtctgcc

SEQ ID NO: 1854 - DNA, 354 bp, synthetic construct
  source 1..354: mol_type = other DNA
gaggtgaagctggtggagtctggcggagacctggtgaagccaggcggaagcctgaagctgtcctgcgccgcttctggcttcacctttagctcctacgccatgagctgggtgcggcagaacccagagaagcgcctggagtgggtggcttccatctctaagggcggaaacacctactaccctaacagcgtgaagggaaggttcacaatctccagggataacgccagaaacatcctgtacctgcagatgtctagcctgaggtccgaggacacagccctgtactactgtgctcggggctggggagattacggctggtttgcctactggggacaggtgaccctggtgacagtgtctgct

SEQ ID NO: 1855 - DNA, 354 bp, synthetic construct
  source 1..354: mol_type = other DNA
gaggtgaaacttgtggagagcggcggggacctggtgaagccaggcggcagcctgaagctgagctgtgccgcctccggcttcaccttcagcagctatgccatgtcctgggtccggcagaaccctgagaagaggctggagtgggtggccagcatcagcaaaggaggcaacacctactaccccaacagcgtcaagggccgcttcaccatctcccgggacaatgccaggaacatcctgtacctgcagatgagctccctgcggtctgaggacacagccctgtattactgcgcccggggctggggagactatggatggtttgcctactggggccaggtgaccctggtcaccgtgtctgcc

SEQ ID NO: 1856 - DNA, 354 bp, synthetic construct
  source 1..354: mol_type = other DNA
gaggtgaaacttgtggagtctggaggagacctggtgaagccaggaggcagcctgaagctgagctgtgctgccagtggcttcaccttcagcagctatgccatgtcctgggtccggcagaaccctgagaagaggctggagtgggtggccagcatctccaagggcggcaacacctactatcccaacagcgtcaaaggaagatttaccatcagccgggacaatgccaggaacatcctctacctgcagatgagctccctgcggtctgaggacacagccctgtactactgtgcccggggctggggagattatggatggtttgcctactggggccaggtgaccctggtcactgtgtctgct

SEQ ID NO: 1857 - DNA, 354 bp, synthetic construct
  source 1..354: mol_type = other DNA
gaggtgaaattagtggagtctggaggagacctggtgaagccaggaggcagcctgaagctgagctgtgctgcttctggcttcaccttcagcagctatgccatgtcctgggtcagacagaatcctgagaagagactggagtgggtggccagcatctccaaaggtggcaacacctactatcccaacagtgttaaaggaagatttaccatcagcagagataatgcaagaaacatcctctacctgcagatgtcttctttaagaagtgaagatacagccctgtactactgtgccagaggctggggagattatggatggtttgcctactggggccaggtgacattagttactgtgtctgct

SEQ ID NO: 1858 - DNA, 354 bp, synthetic construct
  source 1..354: mol_type = other DNA
gaggtgaagctggtggagagcggcggggacctggtcaagcccgggggcagcctgaagctcagctgtgccgcctccggcttcaccttcagcagctatgccatgtcctgggtccggcagaaccctgagaagaggctggagtgggtggccagcatcagcaagggcggcaacacctactatcccaacagcgtgaaaggccgcttcaccatctcccgggacaatgccaggaacatcctgtacctgcagatgagctccctgcgcagcgaggacacagccctctactactgcgcccggggctggggagactatggatggtttgcctactggggccaggtgaccctggttactgtgtctgcc

SEQ ID NO: 1859 - DNA, 354 bp, synthetic construct
  source 1..354: mol_type = other DNA
gaggtgaagctggtggagagcggcggcgacctggtgaagcctggcggcagcctgaagctgagctgcgccgccagcggcttcaccttcagcagctacgccatgagctgggtgagacagaaccctgagaagagactggagtgggtggccagcatcagcaagggcggcaacacctactaccctaacagcgtgaagggcagattcaccatcagcagagacaacgccagaaacatcctgtacctgcagatgagcagcctgagaagcgaggacaccgccctgtactactgcgccagaggctggggcgactacggctggttcgcctactggggccaggtgaccctggtgaccgtgagcgcc

SEQ ID NO: 1860 - protein, 30 aa, synthetic construct
EVHLVESGGALVKPGGSLRLSCAASGFSFS

SEQ ID NO: 1861 - DNA, 57 bp, synthetic construct
  source 1..57: mol_type = other DNA
atgaagttgcctgttaggctgttggtgctgatgttctggattcctgcttccagcagt

SEQ ID NO: 1862 - DNA, 57 bp, synthetic construct
  source 1..57: mol_type = other DNA
atgagtcctgcccagttcctgtttctgttagtgctctggattcgggaaaccaacggt

SEQ ID NO: 1863 - DNA, 72 bp, synthetic construct
  source 1..72: mol_type = other DNA
gccgccaccatgagtcctgcccagttcctgtttctgttagtgctctggattcgggaaaccaacggtgctgcc

SEQ ID NO: 1864 - DNA, 321 bp, synthetic construct
  source 1..321: mol_type = other DNA
cgggctgatgctgcaccaactgtatccatcttcccaccatccagtgagcagttaacatctggaggtgcctcagtcgtgtgcttcttgaacaacttctaccccaaagacatcaatgtcaagtggaagattgatggcagtgaacgacaaaatggcgtcctgaacagttggactgatcaggacagcaaagacagcacctacagcatgagcagcaccctcacgttgaccaaggacgagtatgaacgacataacagctatacctgtgaggccactcacaagacatcaacttcacccattgtcaagagcttcaacaggaatgagtgt

SEQ ID NO: 1865 - protein, 16 aa, synthetic construct
RSSQTIVHSNGNTYLE

SEQ ID NO: 1866 - protein, 9 aa, synthetic construct
FQGSHVPFT

SEQ ID NO: 1867 - protein, 11 aa, synthetic construct
KASQDINKYIA

SEQ ID NO: 1868 - protein, 7 aa, synthetic construct
YTSTLQS

SEQ ID NO: 1869 - protein, 8 aa, synthetic construct
LQYDHLLT

SEQ ID NO: 1870 - protein, 15 aa, synthetic construct
RASKSVSTSDYSYMH

SEQ ID NO: 1871 - protein, 7 aa, synthetic construct
LASNLES

SEQ ID NO: 1872 - protein, 9 aa, synthetic construct
QHSRELPFT

SEQ ID NO: 1873 - protein, 16 aa, synthetic construct
KSSQSLLYSDGKTFLN

SEQ ID NO: 1874 - protein, 7 aa, synthetic construct
LVSKLQS

SEQ ID NO: 1875 - protein, 9 aa, synthetic construct
VQGTHFPYT

SEQ ID NO: 1876 - protein, 16 aa, synthetic construct
KSSQSLLYSDGKTYLN

SEQ ID NO: 1877 - protein, 7 aa, synthetic construct
QVSKLDP

SEQ ID NO: 1878 - protein, 9 aa, synthetic construct
LQGTYYPHT

SEQ ID NO: 1879 - protein, 8 aa, synthetic construct
LQGTYYPH

SEQ ID NO: 1880 - protein, 11 aa, synthetic construct
QASQGTSINLN

SEQ ID NO: 1881 - protein, 7 aa, synthetic construct
GASNLED

SEQ ID NO: 1882 - protein, 7 aa, synthetic construct
LQHTYLP

SEQ ID NO: 1883 - protein, 11 aa, synthetic construct
QASQDTSINLN

SEQ ID NO: 1884 - protein, 7 aa, synthetic construct
GSSNLED

SEQ ID NO: 1885 - protein, 7 aa, synthetic construct
LQHSYLP

SEQ ID NO: 1886 - protein, 16 aa, synthetic construct
RSSQSLVHSNGNTYLH

SEQ ID NO: 1887 - protein, 7 aa, synthetic construct
KVSNRFS

SEQ ID NO: 1888 - protein, 7 aa, synthetic construct
SQSTHVP

SEQ ID NO: 1889 - protein, 15 aa, synthetic construct
  VARIANT 14: note = Any amino acid
WYLQKPGQSPQLLXY

SEQ ID NO: 1890 - protein, 32 aa, synthetic construct
  VARIANT 29: note = Any amino acid
GVPDRFSGSGSGTDFTLKISRVEAEDVGXYYC

SEQ ID NO: 1891 - protein, 10 aa, synthetic construct
FGGGTKVEIK

SEQ ID NO: 1892 - protein, 16 aa, synthetic construct
RSSQTILHSNGNTYLE

SEQ ID NO: 1893 - protein, 16 aa, synthetic construct
KSSQSIVHSNGNTYLE

SEQ ID NO: 1894 - protein, 15 aa, synthetic construct
WYLQKPGQSPQLLVY

SEQ ID NO: 1895 - protein, 7 aa, synthetic construct
KVSKRFS

SEQ ID NO: 1896 - protein, 32 aa, synthetic construct
GVPDRFSGSGSGTDFTLKISRVEAEDVGTYYC

SEQ ID NO: 1897 - protein, 9 aa, synthetic construct
FQGSLVPWA

SEQ ID NO: 1898 - protein, 16 aa, synthetic construct
RSSQSLVHSNQNTYLH

SEQ ID NO: 1899 - protein, 8 aa, synthetic construct
YKVDNRFS

SEQ ID NO: 1900 - protein, 9 aa, synthetic construct
SQSTLVPLT

SEQ ID NO: 1901 - protein, 12 aa, synthetic construct
SESLLHSNGNTY

SEQ ID NO: 1902 - protein, 16 aa, synthetic construct
RSSESLLHSNGNTYLY

SEQ ID NO: 1903 - skipped

SEQ ID NO: 1904 - protein, 7 aa, synthetic construct
RMSNLAS

SEQ ID NO: 1905 - protein, 6 aa, synthetic construct
YLEYPL

SEQ ID NO: 1906 - protein, 9 aa, synthetic construct
MQYLEYPLT

SEQ ID NO: 1907 - protein, 7 aa, synthetic construct
SQDINRY

SEQ ID NO: 1908 - protein, 11 aa, synthetic construct
KASQDINRYLN

SEQ ID NO: 1909 - skipped

SEQ ID NO: 1910 - protein, 7 aa, synthetic construct
RANRLLD

SEQ ID NO: 1911 - protein, 6 aa, synthetic construct
YDEFPL

SEQ ID NO: 1912 - protein, 9 aa, synthetic construct
LQYDEFPLT

SEQ ID NO: 1913 - protein, 122 aa, synthetic construct
DIVLTQTPLSLPVSLGDPASISCRSSQTIVHSNGNTYLEWYLQKPGQSPKLLIYKVSNRFSGVPDRFSGSGSGTDFTLKISRVEAEDLGVYYCFQGSHVPFTFGSGTKLEIKRADAAPTVST

SEQ ID NO: 1914 - protein, 116 aa, synthetic construct
DIVLTQTPSSLSASLGGKVTITCKASQDINKYIAWYQHKPGKGPRLLIHYTSTLQSGIPSRFSGSGSGRDYSFSISNLEPEDIATYYCLQYDHLLTFGAGTKLELKRADAAPTVST

SEQ ID NO: 1915 - protein, 121 aa, synthetic construct
DIVLTQSPTSLAVSLGQRATISCRASKSVSTSDYSYMHWYQQKPGQPPKLLIYLASNLESGVPARFSGSGSGTDFTLNIHPVEEEDAATYYCQHSRELPFTFGGGTKLEIKRADAAPTVST

SEQ ID NO: 1916 - protein, 122 aa, synthetic construct
DIVLTQTPLTLSVTIGQPASISCKSSQSLLYSDGKTFLNWLLQSPGQSPRLLIYLVSKLQSGVPDRFSGSGSGTDFTLKISRVEAEDLGVYYCVQGTHFPYTFGGGTKLEIKRADAAPTVST

SEQ ID NO: 1917 - protein, 122 aa, synthetic construct
DIVMTQSPLSLSVTIGQPASISCKSSQSLLYSDGKTYLNWLQQRPGQSPKRLVYQVSKLDPGIPDRFSGSGSETDFTLKLSRVEAEDLGVYYCLQGTYYPHTFGGGTKLEIKRADAAPTVST

SEQ ID NO: 1918 - protein, 122 aa, synthetic construct
DIVITQSPLSLSVTIGQPASISCKSSQSLLYSDGKTYLNWLQQRPGQSPKRLVYQVSKLDPGIPDRFSGSGSETDFTLKLSRVEAEDLGVYYCLQGTYYPHTFGGGTKLEIKRADAAPTVST

SEQ ID NO: 1919 - protein, 107 aa, synthetic construct
DVQMIQSPSSLSASLGDIVTMTCQASQGTSINLNWFQQKPGKAPKLLIYGASNLEDGVPSRFSGSRYGTDFTLTISSLEDEDMATYFCLQHTYLPFTFGSGTKLEIK

SEQ ID NO: 1920 - protein, 214 aa, synthetic construct
DVQMIQSPSSLSASLGDIVTMTCQASQGTSINLNWFQQKPGKAPKLLIYGASNLEDGVPSRFSGSRYGTDFTLTISSLEDEDMATYFCLQHTYLPFTFGSGTKLEIKRADAAPTVSIFPPSSEQLTSGGASVVCFLNNFYPKDINVKWKIDGSERQNGVLNSWTDQDSKDSTYSMSSTLTLTKDEYERHNSYTCEATHKTSTSPIVKSFNRNEC

SEQ ID NO: 1921 - DNA, 321 bp, synthetic construct
  source 1..321: mol_type = other DNA
gacgtgcagatgatccagagccccagcagcctgagcgccagcctgggcgacatcgtgaccatgacctgccaggccagccagggcaccagcatcaacctgaactggttccagcagaagcccggcaaggcccccaagctgctgatctacggcgccagcaacctggaggacggcgtgcccagcaggttcagcggcagcaggtacggcaccgacttcaccctgaccatcagcagcctggaggacgaggacatggccacctacttctgcctgcagcacacctacctgcccttcaccttcggcagcggcaccaagctggagatcaag

SEQ ID NO: 1922 - DNA, 321 bp, synthetic construct
  source 1..321: mol_type = other DNA
gacgttcagatgatccagagccccagcagcctgagcgccagcctgggcgacatcgtgaccatgacctgccaggccagccagggcaccagcatcaacctgaactggttccagcagaagcccggcaaggcccccaagctgctgatctacggcgccagcaacctggaggacggcgtgcccagccggttcagcggcagccggtacggcaccgacttcaccctgaccatcagcagcctggaggacgaggacatggccacctacttctgcctgcagcacacctacctgcccttcaccttcggcagcggcaccaagctggagatcaag

SEQ ID NO: 1923 - DNA, 321 bp, synthetic construct
  source 1..321: mol_type = other DNA
gatgtgcagatgatccagagcccttcttccctctccgcctccctgggcgacatcgtgaccatgacctgccaggccagccagggcaccagcatcaacctgaactggttccagcagaagcccgggaaggcccccaagctcctcatctacggcgcctcaaatttggaagatggagtgcccagccgcttctccgggtcccgctatggaacagacttcacactgaccatcagcagcctggaggatgaggacatggccacctacttctgcctgcagcacacatacctgcccttcaccttcggcagcgggaccaagctggagatcaag

SEQ ID NO: 1924 - DNA, 321 bp, synthetic construct
  source 1..321: mol_type = other DNA
gacgtgcagatgatccagagcccctccagcctgagcgcctcgctgggggacatcgtgaccatgacctgccaggcctcccagggcaccagcatcaacctcaactggttccagcagaagcccggcaaggcccccaagctgctgatctacggggccagcaacctggaggacggcgtgcccagccgcttcagcggctcccgctacggcacggacttcacgctgaccatctcctccctggaggacgaggacatggccacctacttctgcctgcagcacacctacctgcccttcaccttcggcagcgggaccaagctggagatcaag

SEQ ID NO: 1925 - DNA, 321 bp, synthetic construct
  source 1..321: mol_type = other DNA
gacgtgcagatgatccagagccccagctccctcagcgcctccctgggggacatcgtgaccatgacctgccaggccagccagggcaccagcatcaacctcaactggttccagcagaagcccggcaaggcccccaagctgctgatctacggggcctccaacctggaggacggcgtgccctcccgcttcagcggcagccgctacggcacggacttcacgctgaccatcagcagcctggaggacgaggacatggccacctacttctgcctgcagcacacctacctgcccttcaccttcgggagcgggaccaagttggagatcaag

SEQ ID NO: 1926 - DNA, 321 bp, synthetic construct
  source 1..321: mol_type = other DNA
gacgtgcagatgatccagagccccagcagcctgagcgcctcgctgggggacatcgtgaccatgacctgccaggcctcccagggcaccagcatcaacctcaactggttccagcagaagcccggcaaggcccccaagctcctcatctacggggccagcaacctggaggacggcgtgccctcccgcttcagcggctcccgctacggcacggacttcacgctgaccatctcctccctggaggacgaggacatggccacctacttctgcctgcagcacacctacctgcccttcaccttcggcagcgggaccaagctggagatcaag

SEQ ID NO: 1927 - DNA, 321 bp, synthetic construct
  source 1..321: mol_type = other DNA
gacgttcagatgatccagtccccctcctccctgtccgcctccctgggcgacatcgtgaccatgacctgccaggcctcccagggcacctccatcaacctgaactggttccagcagaagcccggcaaggcccccaagctgctgatctacggcgcctccaacctggaggacggcgtgccctcccggttctccggctcccggtacggcaccgacttcaccctgaccatctcctccctggaggacgaggacatggccacctacttctgcctgcagcacacctacctgcccttcaccttcggctccggcaccaagctggagatcaag

SEQ ID NO: 1928 - DNA, 321 bp, synthetic construct
  source 1..321: mol_type = other DNA
gacgtgcagatgatccagagcccctcctccctgagcgccagcctgggggacatcgtgaccatgacctgccaggcctcccagggcaccagcatcaacctcaactggttccagcagaagcccggcaaggcccccaagctcctcatctacggggccagcaacctggaggacggcgtgcccagccgcttcagcggctcccgctacggcacggacttcacgctgaccatcagcagcctggaggacgaggacatggccacctacttctgcctgcagcacacctacctgcccttcaccttcggcagcgggaccaagctggagatcaag

SEQ ID NO: 1929 - DNA, 321 bp, synthetic construct
  source 1..321: mol_type = other DNA
gacgttcagatgatccagagccctagcagcctgagcgccagcctgggcgacatcgtgaccatgacctgccaggccagccagggcaccagcatcaacctgaactggttccagcagaagcctggcaaggcccctaagctgctgatctacggcgccagcaacctggaggacggcgtgcctagccgtttcagcggcagccgttacggcaccgacttcaccctgaccatcagcagcctggaggacgaggacatggccacctacttctgcctgcagcacacctacctgcctttcaccttcggcagcggcaccaagctggagatcaag

SEQ ID NO: 1930 - DNA, 321 bp, synthetic construct
  source 1..321: mol_type = other DNA
gacgttcagatgatccagagccctagcagcctgagcgccagcctgggcgacatcgtgaccatgacctgccaggccagccagggcaccagcatcaacctgaactggttccagcagaagcctggcaaggcccctaagctgctgatctacggcgccagcaacctggaggacggcgtgcccagccggttcagcggcagccggtacggcaccgacttcaccctgaccatcagcagcctggaggacgaggacatggccacctacttctgcctgcagcacacctacctgcccttcaccttcggcagcggcaccaagctggagatcaag

SEQ ID NO: 1931 - protein, 214 aa, synthetic construct
DVQMIQSPSSLSASLGDIVTMTCQASQDTSINLNWFQQKPGKAPKLLIYGASNLEDGVPSRFSGSRYGTDFTLTISSLEDEDMATYFCLQHTYLPFTFGSGTKLEIKRADAAPTVSIFPPSSEQLTSGGASVVCFLNNFYPKDINVKWKIDGSERQNGVLNSWTDQDSKDSTYSMSSTLTLTKDEYERHNSYTCEATHKTSTSPIVKSFNRNEC

SEQ ID NO: 1932 - protein, 214 aa, synthetic construct
DVQMIQSPSSLSASLGDIVTMTCQASQGTSINLNWFQQKPGKAPKLLIYGSSNLEDGVPSRFSGSRYGTDFTLTISSLEDEDMATYFCLQHSYLPFTFGSGTKLEIKRADAAPTVSIFPPSSEQLTSGGASVVCFLNNFYPKDINVKWKIDGSERQNGVLNSWTDQDSKDSTYSMSSTLTLTKDEYERHNSYTCEATHKTSTSPIVKSFNRNEC

SEQ ID NO: 1933 - protein, 219 aa, synthetic construct
DVMMTQTPLSLPVSLGDQASISCRSSQSLVHSNGNTYLHWHLQKPGQSPKFLIYKVSNRFSGVPDRFSGSGSGTDFTLKISRVEAEDLGVYFCSQSTHVPFTFGSGTKLEIKRADAAPTVSIFPPSSEQLTSGGASVVCFLNNFYPKDINVKWKIDGSERQNGVLNSWTDQDSKDSTYSMSSTLTLTKDEYERHNSYTCEATHKTSTSPIVKSFNRNEC

SEQ ID NO: 1934 - protein, 219 aa, synthetic construct
DVVMTQTPLSLPVSLGDQASISCRSSQSLVHSNGNTYLHWHLQKPGQSPKFLIYKVSNRFSGVPDRFSGSGSGTDFTLKISRVEAEDLGVYFCSQSTHVPFTFGSGTKLEIKRADAAPTVSIFPPSSEQLTSGGASVVCFLNNFYPKDINVKWKIDGSERQNGVLNSWTDQDSKDSTYSMSSTLTLTKDEYERHNSYTCEATHKTSTSPIVKSFNRNEC

SEQ ID NO: 1935 - protein, 214 aa, synthetic construct
DVQMTQSPSSLSASVGDRVTMTCQASQDTSINLNWFQQKPGKAPKLLIYGASNLETGVPSRFSGSRSGTDFTLTISSLQPEDMATYYCLQHTYLPFTFGSGTKLEIKRTVAAPSVFIFPPSDEQLKSGTASVVCLLNNFYPREAKVQWKVDNALQSGNSQESVTEQDSKDSTYSLSSTLTLSKADYEKHKVYACEVTHQGLSSPVTKSFNRGEC

SEQ ID NO: 1936 - DNA, 336 bp, synthetic construct
  source 1..336: mol_type = other DNA
gatgttttgatgacccaaactccgctctccctggcagtcaatcttggagatcaagcctccctctcttgcagatcgagtcagactattttacatagtaatggaaatacctatttagaatggtatttgcagaaaccaggccagtctccaagactcctgatctacaaagtttctaaacgattttctggggtcccagacaggttcagtggcagtggatcagggacagatttcacactcaagatcagcagagtggaggctgacgatctgggaatttattactgctttcaaggttcacttgttccttgggcgttcggtggaggcaccaagctggaaatcaaa

SEQ ID NO: 1937 - protein, 112 aa, synthetic construct
DVLMTQTPLSLAVNLGDQASLSCRSSQTILHSNGNTYLEWYLQKPGQSPRLLIYKVSKRFSGVPDRFSGSGSGTDFTLKISRVEADDLGIYYCFQGSLVPWAFGGGTKLEIK

SEQ ID NO: 1938 - protein, 23 aa, synthetic construct
  VARIANT 3: note = Any amino acid
DVXMTQSPLSLPVTLGQPASISC

SEQ ID NO: 1939 - DNA, 336 bp, synthetic construct
  source 1..336: mol_type = other DNA
gatgttttgatgacccaaactccactctccctgcctgtcagtcttggagatcaagcctccatctcttgcaaatctagtcagagcattgtacatagtaatggaaacacctatttagaatggtacctgcagaaaccaggccagtctccaaagctcctggtctacaaagtttccaatcgattttctggggtcccagacaggttcagtggcagtggatcagggacagatttcacactcaagatcagcagagtggaggctgaggatctgggaacttattactgctttcaaggttcacttgttccttgggcgttcggtggaggcaccaagctggaaatcaaa

SEQ ID NO: 1940 - DNA, 714 bp, synthetic construct
  source 1..714: mol_type = other DNA
atgaagttgcctgttaggctgttggtgctgatgttctggattcctgcttccagcagtgatgttttgatgacccaaactccactctccctgcctgtcagtcttggagatcaagcctccatctcttgcaaatctagtcagagcattgtacatagtaatggaaacacctatttagaatggtacctgcagaaaccaggccagtctccaaagctcctggtctacaaagtttccaatcgattttctggggtcccagacaggttcagtggcagtggatcagggacagatttcacactcaagatcagcagagtggaggctgaggatctgggaacttattactgctttcaaggttcacttgttccttgggcgttcggtggaggcaccaagctggaaatcaaacgggctgatgctgcaccaactgtatccatcttcccaccatccagtgagcagttaacatctggaggtgcctcagtcgtgtgcttcttgaacaacttctaccccaaagacatcaatgtcaagtggaagattgatggcagtgaacgacaaaatggcgtcctgaacagttggactgatcaggacagcaaagacagcacctacagcatgagcagcaccctcacgttgaccaaggacgagtatgaacgacataacagctatacctgtgaggccactcacaagacatcaacttcacccattgtcaagagcttcaacaggaatgagtgt

SEQ ID NO: 1941 - protein, 112 aa, synthetic construct
DVLMTQTPLSLPVSLGDQASISCKSSQSIVHSNGNTYLEWYLQKPGQSPKLLVYKVSNRFSGVPDRFSGSGSGTDFTLKISRVEAEDLGTYYCFQGSLVPWAFGGGTKLEIK

SEQ ID NO: 1942 - DNA, 336 bp, synthetic construct
  source 1..336: mol_type = other DNA
gatgttttgatgacccaaagcccactctccctgcctgtcacccttggacagcccgcctccatctcttgcaaatctagtcagagcattgtacatagtaatggaaacacctatttagaatggtacctgcagaaaccaggccagtctccacagctcctggtctacaaagtttccaatcgattttctggggtcccagacagattcagtggcagtggatcagggacagatttcacactcaagatcagcagagtggaggctgaggatgtgggaacttattactgctttcaaggctcacttgttccttgggcgttcggtggaggcaccaaggtggaaatcaaa

SEQ ID NO: 1943 - protein, 112 aa, synthetic construct
DVLMTQSPLSLPVTLGQPASISCKSSQSIVHSNGNTYLEWYLQKPGQSPQLLVYKVSNRFSGVPDRFSGSGSGTDFTLKISRVEAEDVGTYYCFQGSLVPWAFGGGTKVEIK

SEQ ID NO: 1944 - DNA, 336 bp, synthetic construct
  source 1..336: mol_type = other DNA
gatgttgtgatgacccaaagcccactctccctgcctgtcacccttggacagcccgcctccatctcttgcaaatctagtcagagcattgtacatagtaatggaaacacctatttagaatggtacctgcagaaaccaggccagtctccacagctcctggtctacaaagtttccaatcgattttctggggtcccagacagattcagtggcagtggatcagggacagatttcacactcaagatcagcagagtggaggctgaggatgtgggaacttattactgctttcaaggctcacttgttccttgggcgttcggtggaggcaccaaggtggaaatcaaa

SEQ ID NO: 1945 - protein, 112 aa, synthetic construct
DVVMTQSPLSLPVTLGQPASISCKSSQSIVHSNGNTYLEWYLQKPGQSPQLLVYKVSNRFSGVPDRFSGSGSGTDFTLKISRVEAEDVGTYYCFQGSLVPWAFGGGTKVEIK

SEQ ID NO: 1946 - DNA, 336 bp, synthetic construct
  source 1..336: mol_type = other DNA
gatgttgtgatgacccaaagcccactctccctgcctgtcacccttggacagcccgcctccatctcttgcaaatctagtcagagcattgtacatagtaatggaaacacctatttagaatggtacctgcagaaaccaggccagtctccacagctcctggtctacaaagtttccaatcgattttctggggtcccagacagattcagtggcagtggatcagggacagatttcacactcaagatcagcagagtggaggctgaggatgtgggagtgtattactgctttcaaggctcacttgttccttgggcgttcggtggaggcaccaaggtggaaatcaaa

SEQ ID NO: 1947 - protein, 112 aa, synthetic construct
DVVMTQSPLSLPVTLGQPASISCKSSQSIVHSNGNTYLEWYLQKPGQSPQLLVYKVSNRFSGVPDRFSGSGSGTDFTLKISRVEAEDVGVYYCFQGSLVPWAFGGGTKVEIK

SEQ ID NO: 1948 - DNA, 336 bp, synthetic construct
  source 1..336: mol_type = other DNA
gatgttgtgatgacccaaagcccactctccctgcctgtcacccttggacagcccgcctccatctcttgcaaatctagtcagagcattgtacatagtaatggaaacacctatttagaatggtacctgcagaaaccaggccagtctccacagctcctgatctacaaagtttccaatcgattttctggggtcccagacagattcagtggcagtggatcagggacagatttcacactcaagatcagcagagtggaggctgaggatgtgggagtgtattactgctttcaaggctcacttgttccttgggcgttcggtggaggcaccaaggtggaaatcaaa

SEQ ID NO: 1949 - protein, 112 aa, synthetic construct
DVVMTQSPLSLPVTLGQPASISCKSSQSIVHSNGNTYLEWYLQKPGQSPQLLIYKVSNRFSGVPDRFSGSGSGTDFTLKISRVEAEDVGVYYCFQGSLVPWAFGGGTKVEIK

SEQ ID NO: 1950 - DNA, 714 bp, synthetic construct
  source 1..714: mol_type = other DNA
atgaagttgcctgttaggctgttggtgctgatgttctggattcctgcttccagcagtgatgttgtgatgacccaaactccactctccctgcctgtcagtcttggagatcaagcctccatctcttgcagatctagtcagagccttgtacacagtaatggaaacacctatttacattggtacctgcagaagccaggccagtctccaaagctcctgatctacaaagtttccaaccgattttctggggtcccagacaggttcagtggcagtggatcagggacagatttcacactcaagatcagcagagtggaggctgaggatctgggagtttatttctgctctcaaagtacacatgttccgctcacgttcggtgctgggaccaagctggagctgaaacgggctgatgctgcaccaactgtatccatcttcccaccatccagtgagcagttaacatctggaggtgcctcagtcgtgtgcttcttgaacaacttctaccccaaagacatcaatgtcaagtggaagattgatggcagtgaacgacaaaatggcgtcctgaacagttggactgatcaggacagcaaagacagcacctacagcatgagcagcaccctcacgttgaccaaggacgagtatgaacgacataacagctatacctgtgaggccactcacaagacatcaacttcacccattgtcaagagcttcaacaggaatgagtgt

SEQ ID NO: 1951 - DNA, 717 bp, synthetic construct
  source 1..717: mol_type = other DNA
atgaagttgcctgttaggctgttggtgctgatgttctggattcctgcttccagcagtgatgttgtgatgacccaaactccactctccctgcctgtcagtcttggagatcaagcctccatctcttgcagatctagtcagagccttgtacacagtaatggaaacacctatttacattggtacctgcagaagccaggccagtctccaaagctcctgatctacaaagtttccaaccgattttctggggtcccagacaggttcagtggcagtggatcagggacagatttcacactcaagatcagcagagtggaggctgaggatctgggagtttatttctgctctcaaagtacacatgttccgctcacgttcggtgctgggaccaagctggagctgaaacgggctgatgctgcaccaactgtatccatcttcccaccatccagtgagcagttaacatctggaggtgcctcagtcgtgtgcttcttgaacaacttctaccccaaagacatcaatgtcaagtggaagattgatggcagtgaacgacaaaatggcgtcctgaacagttggactgatcaggacagcaaagacagcacctacagcatgagcagcaccctcacgttgaccaaggacgagtatgaacgacataacagctatacctgtgaggccactcacaagacatcaacttcacccattgtcaagagcttcaacaggaatgagtgttag

SEQ ID NO: 1952 - DNA, 657 bp, synthetic construct
  source 1..657: mol_type = other DNA
gaaattgtgttgacgcagtctccaggcaccctgtctttgtctccaggggaaagagccaccctctcctgcagatctagtcagagccttgtacacagtaatcagaacacctatttacattggtaccagcagaaacctggccaggctcccaggctcctcatctataaagttgacaaccgattttctggcatcccagacaggttcagtggcagtgggtctgggacagacttcactctcaccatcagcagactggagcctgaagattttgcagtgtattactgttctcaaagtacactggttccgctcacgttcggcggagggaccaaggtggagatcaaacggaccgtggctgcaccatctgtcttcatcttcccgccatctgatgagcagttgaaatctggaactgcctctgttgtgtgcctgctgaataacttctatcccagagaggccaaagtacagtggaaggtggataacgccctccaatcgggtaactcccaggagagtgtcacagagcaggacagcaaggacagcacctacagcctcagcagcaccctgacgctgagcaaagcagactacgagaaacacaaagtctacgcctgcgaagtcacccatcagggcctgagctcgcccgtcacaaagagcttcaacaggggagagtgc

SEQ ID NO: 1953 - protein, 238 aa, synthetic construct
MKLPVRLLVLMFWIPASSSDVVMTQTPLSLPVSLGDQASISCRSSQSLVHSNGNTYLHWYLQKPGQSPKLLIYKVSNRFSGVPDRFSGSGSGTDFTLKISRVEAEDLGVYFCSQSTHVPLTFGAGTKLELKRADAAPTVSIFPPSSEQLTSGGASVVCFLNNFYPKDINVKWKIDGSERQNGVLNSWTDQDSKDSTYSMSSTLTLTKDEYERHNSYTCEATHKTSTSPIVKSFNRNEC

SEQ ID NO: 1954 - protein, 219 aa, synthetic construct
EIVLTQSPGTLSLSPGERATLSCRSSQSLVHSNQNTYLHWYQQKPGQAPRLLIYKVDNRFSGIPDRFSGSGSGTDFTLTISRLEPEDFAVYYCSQSTLVPLTFGGGTKVEIKRTVAAPSVFIFPPSDEQLKSGTASVVCLLNNFYPREAKVQWKVDNALQSGNSQESVTEQDSKDSTYSLSSTLTLSKADYEKHKVYACEVTHQGLSSPVTKSFNRGEC

SEQ ID NO: 1955 - protein, 112 aa, synthetic construct
EIVLTQSPGTLSLSPGERATLSCRSSQSLVHSNQNTYLHWYQQKPGQAPRLLIYKVDNRFSGIPDRFSGSGSGTDFTLTISRLEPEDFAVYYCSQSTLVPLTFGGGTKVEIK

SEQ ID NO: 1956 - DNA, 339 bp, synthetic construct
  source 1..339: mol_type = other DNA
gatgttgtgatgacccagactccactcactttgtcggttaccattggacaaccagcctccatctcttgcaagtcaagtcagagcctcttagatagtgatggaaagacatatttgaattggttgttacagaggccaggccagtctccaaagcgcctaatctatctggtgtctaaactggactctggagtccccgacagattcactggcagtggatcagggacagatttcacactgaaaattagcagagtggaggctgaggatttgggagtttattattgctggcaaggtacacattttcctcggacgttcggtggaggcaccaagctggaaatcaaacgg

SEQ ID NO: 1957 - DNA, 339 bp, synthetic construct
  source 1..339: mol_type = other DNA
gatgttgtgatgacccagactccactcactttgtcggttaccattggacaaccagcctccatctcttgcaagtcaagtcagagcctcttagatagtgatggaaagacatatttgaattggttgttacagaggccaggccagtctccaaagcgcctaatctatctggtgtctaaactggactctggagtccctgacagattcactggcagtggatcagggacagatttcacactgaaaattagcagagtggaggctgaggatttgggagtttattattgctggcaaggtacacattttcctcggacgttcggtggaggcaccaagctggaaatcaaacgg

SEQ ID NO: 1958 - DNA, 396 bp, synthetic construct
  source 1..396: mol_type = other DNA
atgagtcctgcccagttcctgtttctgttagtgctctggattcgggaaaccaacggtgatgttgtgatgacccagactccactcactttgtcggttaccattggacaaccagcctccatctcttgcaagtcaagtcagagcctcttagatagtgatggaaagacatatttgaattggttgttacagaggccaggccagtctccaaagcgcctaatctatctggtgtctaaactggactctggagtccccgacagattcactggcagtggatcagggacagatttcacactgaaaattagcagagtggaggctgaggatttgggagtttattattgctggcaaggtacacattttcctcggacgttcggtggaggcaccaagctggaaatcaaacgg

SEQ ID NO: 1959 - DNA, 657 bp, synthetic construct
  source 1..657: mol_type = other DNA
gatgttgtgatgacccagactccactcactttgtcggttaccattggacaaccagcctccatctcttgcaagtcaagtcagagcctcttagatagtgatggaaagacatatttgaattggttgttacagaggccaggccagtctccaaagcgcctaatctatctggtgtctaaactggactctggagtccctgacagattcactggcagtggatcagggacagatttcacactgaaaattagcagagtggaggctgaggatttgggagtttattattgctggcaaggtacacattttcctcggacgttcggtggaggcaccaagctggaaatcaaacgggctgatgctgcaccaactgtatccatcttcccaccatccagtgagcagttaacatctggaggtgcctcagtcgtgtgcttcttgaacaacttctaccccaaagacatcaatgtcaagtggaagattgatggcagtgaacgacaaaatggcgtcctgaacagttggactgatcaggacagcaaagacagcacctacagcatgagcagcaccctcacgttgaccaaggacgagtatgaacgacataacagctatacctgtgaggccactcacaagacatcaacttcacccattgtcaagagcttcaacaggaatgagtgt

SEQ ID NO: 1960 - DNA, 660 bp, synthetic construct
  source 1..660: mol_type = other DNA
gatgttgtgatgacccagactccactcactttgtcggttaccattggacaaccagcctccatctcttgcaagtcaagtcagagcctcttagatagtgatggaaagacatatttgaattggttgttacagaggccaggccagtctccaaagcgcctaatctatctggtgtctaaactggactctggagtccctgacagattcactggcagtggatcagggacagatttcacactgaaaattagcagagtggaggctgaggatttgggagtttattattgctggcaaggtacacattttcctcggacgttcggtggaggcaccaagctggaaatcaaacgggctgatgctgcaccaactgtatccatcttcccaccatccagtgagcagttaacatctggaggtgcctcagtcgtgtgcttcttgaacaacttctaccccaaagacatcaatgtcaagtggaagattgatggcagtgaacgacaaaatggcgtcctgaacagttggactgatcaggacagcaaagacagcacctacagcatgagcagcaccctcacgttgaccaaggacgagtatgaacgacataacagctatacctgtgaggccactcacaagacatcaacttcacccattgtcaagagcttcaacaggaatgagtgttag

SEQ ID NO: 1961 - DNA, 678 bp, synthetic construct
  source 1..678: mol_type = other DNA
gatgttgtgatgacccagactccactcactttgtcggttaccattggacaaccagcctccatctcttgcaagtcaagtcagagcctcttagatagtgatggaaagacatatttgaattggttgttacagaggccaggccagtctccaaagcgcctaatctatctggtgtctaaactggactctggagtccctgacagattcactggcagtggatcagggacagatttcacactgaaaattagcagagtggaggctgaggatttgggagtttattattgctggcaaggtacacattttcctcggacgttcggtggaggcaccaagctggaaatcaaacgggctgatgctgcaccaactgtatccatcttcccaccatccagtgagcagttaacatctggaggtgcctcagtcgtgtgcttcttgaacaacttctaccccaaagacatcaatgtcaagtggaagattgatggcagtgaacgacaaaatggcgtcctgaacagttggactgatcaggacagcaaagacagcacctacagcatgagcagcaccctcacgttgaccaaggacgagtatgaacgacataacagctatacctgtgaggccactcacaagacatcaacttcacccattgtcaagagcttcaacaggaatgagtgtagcgagaaggacgagctgtag

SEQ ID NO: 1962 - DNA, 714 bp, synthetic construct
  source 1..714: mol_type = other DNA
atgagtcctgcccagttcctgtttctgttagtgctctggattcgggaaaccaacggtgatgttgtgatgacccagactccactcactttgtcggttaccattggacaaccagcctccatctcttgcaagtcaagtcagagcctcttagatagtgatggaaagacatatttgaattggttgttacagaggccaggccagtctccaaagcgcctaatctatctggtgtctaaactggactctggagtccctgacagattcactggcagtggatcagggacagatttcacactgaaaattagcagagtggaggctgaggatttgggagtttattattgctggcaaggtacacattttcctcggacgttcggtggaggcaccaagctggaaatcaaacgggctgatgctgcaccaactgtatccatcttcccaccatccagtgagcagttaacatctggaggtgcctcagtcgtgtgcttcttgaacaacttctaccccaaagacatcaatgtcaagtggaagattgatggcagtgaacgacaaaatggcgtcctgaacagttggactgatcaggacagcaaagacagcacctacagcatgagcagcaccctcacgttgaccaaggacgagtatgaacgacataacagctatacctgtgaggccactcacaagacatcaacttcacccattgtcaagagcttcaacaggaatgagtgt

SEQ ID NO: 1963 - DNA, 720 bp, synthetic construct
  source 1..720: mol_type = other DNA
atgatgagtcctgcccagttcctgtttctgttagtgctctggattcgggaaaccaacggtgatgttgtgatgacccagactccactcactttgtcggttaccattggacaaccagcctccatctcttgcaagtcaagtcagagcctcttagatagtgatggaaagacatatttgaattggttgttacagaggccaggccagtctccaaagcgcctaatctatctggtgtctaaactggactctggagtccctgacagattcactggcagtggatcagggacagatttcacactgaaaattagcagagtggaggctgaggatttgggagtttattattgctggcaaggtacacattttcctcggacgttcggtggaggcaccaagctggaaatcaaacgggctgatgctgcaccaactgtatccatcttcccaccatccagtgagcagttaacatctggaggtgcctcagtcgtgtgcttcttgaacaacttctaccccaaagacatcaatgtcaagtggaagattgatggcagtgaacgacaaaatggcgtcctgaacagttggactgatcaggacagcaaagacagcacctacagcatgagcagcaccctcacgttgaccaaggacgagtatgaacgacataacagctatacctgtgaggccactcacaagacatcaacttcacccattgtcaagagcttcaacaggaatgagtgttag

SEQ ID NO: 1964 - protein, 239 aa, synthetic construct
MMSPAQFLFLLVLWIRETNGDVVMTQTPLTLSVTIGQPASISCKSSQSLLDSDGKTYLNWLLQRPGQSPKRLIYLVSKLDSGVPDRFTGSGSGTDFTLKISRVEAEDLGVYYCWQGTHFPRTFGGGTKLEIKRADAAPTVSIFPPSSEQLTSGGASVVCFLNNFYPKDINVKWKIDGSERQNGVLNSWTDQDSKDSTYSMSSTLTLTKDEYERHNSYTCEATHKTSTSPIVKSFNRNEC

SEQ ID NO: 1965 - DNA, 732 bp, synthetic construct
  source 1..732: mol_type = other DNA
gccgccaccatgggatggagctggatctttctctttctcctgtcaggaactacaggtgtcctctctgctgccgatgttgtgatgacccagactccactcactttgtcggttaccattggacaaccagcctccatctcttgcaagtcaagtcagagcctcttagatagtgatggaaagacatatttgaattggttgttacagaggccaggccagtctccaaagcgcctaatctatctggtgtctaaactggactctggagtccctgacagattcactggcagtggatcagggacagatttcacactgaaaattagcagagtggaggctgaggatttgggagtttattattgctggcaaggtacacattttcctcggacgttcggtggaggcaccaagctggaaatcaaacgggctgatgctgcaccaactgtatccatcttcccaccatccagtgagcagttaacatctggaggtgcctcagtcgtgtgcttcttgaacaacttctaccccaaagacatcaatgtcaagtggaagattgatggcagtgaacgacaaaatggcgtcctgaacagttggactgatcaggacagcaaagacagcacctacagcatgagcagcaccctcacgttgaccaaggacgagtatgaacgacataacagctatacctgtgaggccactcacaagacatcaacttcacccattgtcaagagcttcaacaggaatgagtgttag

SEQ ID NO: 1966 - DNA, 747 bp, synthetic construct
  source 1..747: mol_type = other DNA
atgatgagtcctgcccagttcctgtttctgttagtgctctggattcgggaaaccaacggtgatgttgtgatgacccagactccactcactttgtcggttaccattggacaaccagcctccatctcttgcaagtcaagtcagagcctcttagatagtgatggaaagacatatttgaattggttgttacagaggccaggccagtctccaaagcgcctaatctatctggtgtctaaactggactctggagtccctgacagattcactggcagtggatcagggacagatttcacactgaaaattagcagagtggaggctgaggatttgggagtttattattgctggcaaggtacacattttcctcggacgttcggtggaggcaccaagctggaaatcaaacgggctgatgctgcaccaactgtatccatcttcccaccatccagtgagcagttaacatctggaggtgcctcagtcgtgtgcttcttgaacaacttctaccccaaagacatcaatgtcaagtggaagattgatggcagtgaacgacaaaatggcgtcctgaacagttggactgatcaggacagcaaagacagcacctacagcatgagcagcaccctcacgttgaccaaggacgagtatgaacgacataacagctatacctgtgaggccactcacaagacatcaacttcacccattgtcaagagcttcaacaggaatgagtgttacccatacgatgttccagattacgcttag

SEQ ID NO: 1967 - DNA, 336 bp, synthetic construct
  source 1..336: mol_type = other DNA
gatattgtgatgactcaggctgcaccctctgtacctgtcactcctggagagtcagtttccatctcctgcaggtctagtgagagtctcctgcatagtaatggcaacacttacttgtattggttcctgcagaggccaggccagtctcctcagctcctgatatatcggatgtccaaccttgcctcaggagtcccagacaggttcagtggcagtgggtcaggaactgctttcacactgagaatcagtagagtggaggctgaggatgtgggtgtttattactgtatgcaatatctagaatatccgctcacgttcggtgctgggaccaagctggagctgaaa

SEQ ID NO: 1968 - protein, 112 aa, synthetic construct
DIVMTQAAPSVPVTPGESVSISCRSSESLLHSNGNTYLYWFLQRPGQSPQLLIYRMSNLASGVPDRFSGSGSGTAFTLRISRVEAEDVGVYYCMQYLEYPLTFGAGTKLELK

SEQ ID NO: 1969 - DNA, 321 bp, synthetic construct
  source 1..321: mol_type = other DNA
gacatcaagatgacccagtctccatcttccatgtatgcatctctaggagagagagtcactatcacttgcaaggcgagtcaggacattaataggtatttaaactggttccagcagaaaccagggaaatctcctaagaccctgatctatcgtgcaaacagattgctagatggggtcccatcaaggttcagtggcagtggatctgggcaagattactctctcaccatcagcagcctggattatgaagatatgggaatttattattgtctacagtatgatgagtttccgctcacgttcggtgatgggaccaagctggagctgaaa

SEQ ID NO: 1970 - protein, 107 aa, synthetic construct
DIKMTQSPSSMYASLGERVTITCKASQDINRYLNWFQQKPGKSPKTLIYRANRLLDGVPSRFSGSGSGQDYSLTISSLDYEDMGIYYCLQYDEFPLTFGDGTKLELK

SEQ ID NO: 1971 - DNA, 321 bp, synthetic construct
  source 1..321: mol_type = other DNA
gatattaaaatgacccagagcccgagcagcatgtatgcgagcctgggcgaacgcgtgaccattacctgcaaagcgagccaggatattaaccgctatctgaactggtttcagcagaaaccgggcaaaagcccgaaaaccctgatttatcgcgcgaaccgcctgctggatggcgtgccgagccgctttagcggcagcggcagcggccaggattatagcctgaccattagcagcctggattatgaagatatgggcatttattattgcctgcagtatgatgaatttccgctgacctttggcgatggcaccaaactggaactgaaa

SEQ ID NO: 1972 - DNA, 321 bp, synthetic construct
  source 1..321: mol_type = other DNA
gatatcaagatgacccagagccccagctccatgtatgccagcctgggggagcgggtgaccatcacctgcaaggcctcccaggacatcaaccgctacctgaactggttccagcagaagccaggcaagtcccccaagaccctcatctatcgggccaaccggctgctggatggagtgccctcccgcttctccggcagtggcagcggccaggattacagcctcaccatttcttccctggactatgaggacatgggcatctactactgcctgcagtatgatgagttccccctgacctttggagatggcaccaagctggagctgaag

SEQ ID NO: 1973 - DNA, 321 bp, synthetic construct
  source 1..321: mol_type = other DNA
gacatcaagatgacccagagccccagcagcatgtacgccagcctgggcgagagggtgaccatcacctgcaaggccagccaggacatcaacaggtacctgaactggttccagcagaagcccggcaagagccccaagaccctgatctacagggccaacaggctgctggacggcgtgcccagcaggttcagcggcagcggcagcggccaggactacagcctgaccatcagcagcctggactacgaggacatgggcatctactactgcctgcagtacgacgagttccccctgaccttcggcgacggcaccaagctggagctgaag

SEQ ID NO: 1974 - DNA, 321 bp, synthetic construct
  source 1..321: mol_type = other DNA
gacatcaagatgacccagagcccttcctccatgtatgcctccctgggggagcgggtgaccatcacctgcaaggccagccaggatatcaaccgctacctgaactggttccagcagaagccaggcaagagccccaagaccctcatctatcgggccaaccggctgctggatggagtgcccagccgcttctccggcagcggcagtggccaggactacagcctcaccatttccagcctggactatgaggacatgggcatctactactgcctgcagtatgatgagttccccctgacctttggagatggcaccaagctggagctgaag

SEQ ID NO: 1975 - DNA, 321 bp, synthetic construct
  source 1..321: mol_type = other DNA
gacatcaagatgacccagtcccccagctccatgtacgcctctctgggagagcgggtgaccatcacatgcaaggcttctcaggatatcaaccgctacctgaactggttccagcagaagcccggaaagagccctaagaccctgatctacagggccaacagactgctggacggcgtgccaagcaggttttccggctctggaagcggccaggattactccctgacaatctctagcctggactacgaggatatgggcatctactactgtctgcagtacgacgagttccccctgacctttggagatggcacaaagctggagctgaag

SEQ ID NO: 1976 - DNA, 321 bp, synthetic construct
  source 1..321: mol_type = other DNA
gacatcaagatgacccagagcccttcctccatgtatgcctccctgggggagcgggtgaccatcacctgcaaggccagccaggatatcaaccgctacctgaactggttccagcagaagcccggcaagagccccaagaccctcatctatcgggccaaccggctgctggatggagtgcccagccgcttctccggcagcggcagtggccaggactacagcctgaccatttcttctctggactatgaggacatgggcatctactactgcctgcagtatgatgagttccccctgacatttggagatggcaccaagctggagctgaag

SEQ ID NO: 1977 - DNA, 321 bp, synthetic construct
  source 1..321: mol_type = other DNA
cgggctgatgctgcaccaactgtatccatcttcccaccatccagtgagcagttaacatctggaggtgcctcagtcgtgtgcttcttgaacaacttctaccccaaagacatcaatgtcaagtggaagattgatggcagtgaacgacaaaatgacatcaagatgacccagagcccttcctccatgtatgcctccctgggggagcgggtgacaatcacctgcaaggccagccaggatatcaaccgctacctgaactggttccagcagaagccaggcaagagccccaagaccctcatctatagagccaaccggctgctggacggc

SEQ ID NO: 1978 - DNA, 321 bp, synthetic construct
  source 1..321: mol_type = other DNA
gacatcaagatgacccagagcccttcttccatgtatgcttctttaggagaaagagtgacaatcacctgcaaggccagccaggatatcaaccgctacctgaactggttccagcagaagccaggaaaatctcccaagaccctgatttatagagccaacagactgctggacggcgtgcccagccgcttcagtggatctggaagtggccaggactacagcctgaccatctcttctctggattatgaagacatgggcatctactactgcctgcagtatgatgaatttcctttaacatttggagatggcaccaagctggagctgaag

SEQ ID NO: 1979 - DNA, 321 bp, synthetic construct
  source 1..321: mol_type = other DNA
gatatcaagatgacccagagcccttcctccatgtatgcctccctgggggagcgggtgaccatcacctgcaaggccagccaggacatcaaccgctacctgaactggttccagcagaagcccggcaagagccccaagaccctcatctatcgggccaaccggctgctggatggagtgcccagccgcttctccggcagcggcagtggccaggattacagcctcaccatttccagcctggactatgaggacatgggcatctactactgcctgcagtatgatgagttccccctgacctttggagatggcaccaagctggagctgaag

SEQ ID NO: 1980 - DNA, 321 bp, synthetic construct
  source 1..321: mol_type = other DNA
gacatcaagatgacccagagccctagcagcatgtacgccagcctgggcgagagagtgaccatcacctgcaaggccagccaggacatcaacagatacctgaactggttccagcagaagcctggcaagagccctaagaccctgatctacagagccaacagactgctggacggcgtgcctagcagattcagcggcagcggcagcggccaggactacagcctgaccatcagcagcctggactacgaggacatgggcatctactactgcctgcagtacgacgagttccctctgaccttcggcgacggcaccaagctggagctgaag

SEQ ID NO: 1981 - protein, 23 aa, synthetic construct
DVLMTQSPLSLPVTLGQPASISC

SEQ ID NO: 1982 - protein, 18 aa, synthetic construct
  VARIANT 9: note = Any amino acid
  VARIANT 12: note = Any amino acid
RSGYSSPGXPGXPGSRSR

SEQ ID NO: 1983 - protein, 18 aa, synthetic construct
  VARIANT 9: note = Any amino acid
  VARIANT 12: note = Any amino acid
  VARIANT 15: note = Any amino acid
RSGYSSPGXPGXPGXRSR

SEQ ID NO: 1984 - DNA, 2168 bp, synthetic construct
  source 1..2168: mol_type = other DNA
gaggagccaccatggaatggacctgggtctttctcttcctcctgtcagtaactgcaggtgtccactcccaggttcagctgcagcagtctggagctgagctgatgaagcctggggcctcagtgaagatatcctgcaaggctactggctacacattcagtaactactggatagagtgggtaaagcagaggcctggacatggccttgagtggattggagagattttacctggaagtgatagtattaagtacaatgagaatttcaagggcaaggccacattcactgcagatacatcctccaacacagcctacatgcaactcagcagcctgacatctgaggactctgccgtctattactgtgcaagaagggggaactacccagactactggggccaaggcaccactctcacagtctcctcagccaaaacgacacccccatctgtctatccactggcccctggatctgctgcccaaactaactccatggtgaccctgggatgcctggtcaagggctatttccctgagccagtgacagtgacctggaactctggatccctgtccagcggtgtgcacaccttcccagctgtcctgcagtctgacctctacactctgagcagctcagtgactgtcccctccagcacctggcccagcgagaccgtcacctgcaacgttgcccacccggccagcagcaccaaggtggacaagaaaattgtgcccagggattgtggttgtaagccttgcatatgtacagtcccagaagtatcatctgtcttcatcttccccccaaagcccaaggatgtgctcaccattactctgactcctaaggtcacgtgtgttgtggtagacatcagcaaggatgatcccgaggtccagttcagctggtttgtagatgatgtggaggtgcacacagctcagacgcaaccccgggaggagcagttcaacagcactttccgctcagtcagtgaacttcccatcatgcaccaggactggctcaatggcaaggagttcaaatgcagggtcaacagtgcagctttccctgcccccatcgagaaaaccatctccaaaaccaaaggcagaccgaaggctccacaggtgtacaccattccacctcccaaggagcagatggccaaggataaagtcagtctgacctgcatgataacagacttcttccctgaagacattactgtggagtggcagtggaatgggcagccagcggagaactacaagaacactcagcccatcatggacacagatggctcttacttcgtctacagcaagctcaatgtgcagaagagcaactgggaggcaggaaatactttcacctgctctgtgttacatgagggcctgcacaaccaccatactgagaagagcctctcccactctcctggtagaaagaggcgagagggcagaggaagtcttctaacatgcggtgacgtggaggagaatcccggccctatgaagttgcctgttaggctgttggtgctgatgttctggattcctgcttccagcagtgatgttgtgatgacccaaactccactctccctgcctgtcagtcttggagatcaagcctccatctcttgcagatctagtcagagccttgtacacagtaatggaaacacctatttacattggtacctgcagaagccaggccagtctccaaagctcctgatctacaaagtttccaaccgattttctggggtcccagacaggttcagtggcagtggatcagggacagatttcacactcaagatcagcagagtggaggctgaggatctgggagtttatttctgctctcaaagtacacatgttccgctcacgttcggtgctgggaccaagctggagctgaaacgggctgatgctgcaccaactgtatccatcttcccaccatccagtgagcagttaacatctggaggtgcctcagtcgtgtgcttcttgaacaacttctaccccaaagacatcaatgtcaagtggaagattgatggcagtgaacgacaaaatggcgtcctgaacagttggactgatcaggacagcaaagacagcacctacagcatgagcagcaccctcacgttgaccaaggacgagtatgaacgacataacagctatacctgtgaggccactcacaagacatcaacttcacccattgtcaagagcttcaacaggaatgagtgttag

SEQ ID NO: 1985 - protein, 718 aa, synthetic construct
MEWTWVFLFLLSVTAGVHSQVQLQQSGAELMKPGASVKISCKATGYTFSNYWIEWVKQRPGHGLEWIGEILPGSDSIKYNENFKGKATFTADTSSNTAYMQLSSLTSEDSAVYYCARRGNYPDYWGQGTTLTVSSAKTTPPSVYPLAPGSAAQTNSMVTLGCLVKGYFPEPVTVTWNSGSLSSGVHTFPAVLQSDLYTLSSSVTVPSSTWPSETVTCNVAHPASSTKVDKKIVPRDCGCKPCICTVPEVSSVFIFPPKPKDVLTITLTPKVTCVVVDISKDDPEVQFSWFVDDVEVHTAQTQPREEQFNSTFRSVSELPIMHQDWLNGKEFKCRVNSAAFPAPIEKTISKTKGRPKAPQVYTIPPPKEQMAKDKVSLTCMITDFFPEDITVEWQWNGQPAENYKNTQPIMDTDGSYFVYSKLNVQKSNWEAGNTFTCSVLHEGLHNHHTEKSLSHSPGRKRREGRGSLLTCGDVEENPGPMKLPVRLLVLMFWIPASSSDVVMTQTPLSLPVSLGDQASISCRSSQSLVHSNGNTYLHWYLQKPGQSPKLLIYKVSNRFSGVPDRFSGSGSGTDFTLKISRVEAEDLGVYFCSQSTHVPLTFGAGTKLELKRADAAPTVSIFPPSSEQLTSGGASVVCFLNNFYPKDINVKWKIDGSERQNGVLNSWTDQDSKDSTYSMSSTLTLTKDEYERHNSYTCEATHKTSTSPIVKSFNRNEC

SEQ ID NO: 1986 - DNA, 2168 bp, synthetic construct
  source 1..2168: mol_type = other DNA
gaggagccaccatggagtggacctgggtgttcctgttcctgctgagcgtgaccgccggcgtgcactcccaagtccagctgcagcagagcggcgccgagctgatgaagcccggcgccagcgtgaagatcagctgcaaggccaccggctacaccttcagcaactactggatcgagtgggtgaagcagcggcccggccacggcctggagtggatcggcgagatcctgcccggcagcgacagcatcaagtacaacgagaacttcaagggcaaggccaccttcaccgccgacaccagcagcaacaccgcctacatgcagctgagcagcctgaccagcgaggacagcgccgtgtactactgcgcccggcggggcaactaccccgactactggggccagggcaccaccctgaccgtctccagcgccaagaccacaccacccagcgtgtacccactggctccaggcagcgctgcccagaccaacagcatggtgaccctgggctgcctggtgaagggctacttccccgagcccgtgaccgtgacctggaacagcggcagcctgagcagcggcgtgcacaccttcccagccgtgctccaaagcgacctgtacacactgagcagcagcgtgaccgtgcccagcagcacctggcccagcgagaccgtgacctgcaacgtggcccaccccgccagcagcaccaaggtggacaagaagatcgtgccccgggactgcggctgcaagccctgcatctgcaccgtgcccgaagtcagcagcgtgttcatcttcccacccaagcccaaggacgtgctgaccatcaccctgacacccaaagtcacctgcgtggtggtggacatcagcaaggacgaccccgaggtgcagttcagctggttcgtggacgacgtggaggtgcacaccgcccagacccagccccgggaggagcagttcaacagcaccttccggagcgtgagcgagctgcccatcatgcaccaggactggctgaacggcaaggagttcaagtgccgggtgaacagcgccgccttccccgcccccatcgagaagaccatcagcaagaccaagggacggcccaaggctccccaggtgtacaccatcccaccacccaaggagcagatggccaaggacaaagtcagcctgacctgcatgatcaccgacttcttccccgaggacatcaccgtggagtggcagtggaacggccagcccgccgagaactacaagaacacccagcccatcatggacaccgacggcagctacttcgtgtacagcaagctgaacgtgcagaagagcaactgggaggccggcaacaccttcacctgcagcgtgctgcacgagggcctgcacaaccatcacaccgagaagagcctgagccacagcccaggacggaagcgccgcgagggcaggggcagcctgctgacctgcggcgacgtggaggagaacccaggccccatgaagctgcccgtgcggctgctggtgctgatgttctggatccccgccagcagcagcgacgtggtgatgacccagaccccactgagcctgcccgtgagcctgggcgaccaggccagcatcagctgccggagcagccagagcctggtgcacagcaacggcaacacctacctgcactggtacctgcagaagcccggccagagccccaagctgctgatctacaaagtcagcaaccggttcagcggcgtgcccgaccggttcagcggcagcggcagcggcaccgacttcaccctgaagatcagccgggtggaggccgaggacctgggcgtgtacttctgcagccagagcacccacgtgcccctgaccttcggcgccggcaccaagctggagctgaagcgggccgacgccgctcccaccgtcagcatcttcccaccctcctccgagcagctgaccagcggaggcgccagcgtggtgtgcttcctgaacaacttctaccccaaggacatcaacgtgaagtggaagatcgacggcagcgagcggcagaacggcgtgctgaacagctggaccgaccaggacagcaaggacagcacctacagcatgagcagcaccctgaccctgaccaaggacgagtacgagcggcacaacagctacacctgcgaggccacccacaagaccagcaccagccccatcgtgaagagcttcaaccggaacgagtgctga

SEQ ID NO: 1987 - DNA, 2174 bp, synthetic construct
  source 1..2174: mol_type = other DNA
gaggagccaccatgggatggagctggatctttctctttctcctgtcaggaactacaggtgtcctctctgaggtccagctgcaacagtctggacctgagctggtgaagcctggggcttcagtgaagatatcctgcaagacttctggatacacattcactgaatacaccatacactgggtgaagcagagccatggagagagccttgagtggattggaggtattaatccaaacgatggtggtactatttacaaccagaagttcaagggcaaggccacattgactgtagacaagtcctccaaaacagcctacatggagctccgcagcctgacatctgaggattctgcagtcttttactgtgcaagagggccctccgccaggtttccttactggggccaagggactctggtcactgtctctgcagccaaaacgacacccccatctgtctatccactggcccctggatctgctgcccaaactaactccatggtgaccctgggatgcctggtcaagggctatttccctgagccagtgacagtgacctggaactctggatccctgtccagcggtgtgcacaccttcccagctgtcctgcagtctgacctctacactctgagcagctcagtgactgtcccctccagcacctggcccagcgagaccgtcacctgcaacgttgcccacccggccagcagcaccaaggtggacaagaaaattgtgcccagggattgtggttgtaagccttgcatatgtacagtcccagaagtatcatctgtcttcatcttccccccaaagcccaaggatgtgctcaccattactctgactcctaaggtcacgtgtgttgtggtagacatcagcaaggatgatcccgaggtccagttcagctggtttgtagatgatgtggaggtgcacacagctcagacgcaaccccgggaggagcagttcaacagcactttccgctcagtcagtgaacttcccatcatgcaccaggactggctcaatggcaaggagttcaaatgcagggtcaacagtgcagctttccctgcccccatcgagaaaaccatctccaaaaccaaaggcagaccgaaggctccacaggtgtacaccattccacctcccaaggagcagatggccaaggataaagtcagtctgacctgcatgataacagacttcttccctgaagacattactgtggagtggcagtggaatgggcagccagcggagaactacaagaacactcagcccatcatggacacagatggctcttacttcgtctacagcaagctcaatgtgcagaagagcaactgggaggcaggaaatactttcacctgctctgtgttacatgagggcctgcacaaccaccatactgagaagagcctctcccactctcctggtagaaagaggcgagagggcagaggaagtcttctaacatgcggtgacgtggaggagaatcccggccctatgatgagtcctgcccagttcctgtttctgttagtgctctggattcgggaaaccaacggtgatgttgtgatgacccagactccactcactttgtcggttaccattggacaaccagcctccatctcttgcaagtcaagtcagagcctcttagatagtgatggaaagacatatttgaattggttgttacagaggccaggccagtctccaaagcgcctaatctatctggtgtctaaactggactctggagtccctgacagattcactggcagtggatcagggacagatttcacactgaaaattagcagagtggaggctgaggatttgggagtttattattgctggcaaggtacacattttcctcggacgttcggtggaggcaccaagctggaaatcaaacgggctgatgctgcaccaactgtatccatcttcccaccatccagtgagcagttaacatctggaggtgcctcagtcgtgtgcttcttgaacaacttctaccccaaagacatcaatgtcaagtggaagattgatggcagtgaacgacaaaatggcgtcctgaacagttggactgatcaggacagcaaagacagcacctacagcatgagcagcaccctcacgttgaccaaggacgagtatgaacgacataacagctatacctgtgaggccactcacaagacatcaacttcacccattgtcaagagcttcaacaggaatgagtgttag

SEQ ID NO: 1988 - protein, 720 aa, synthetic construct
MGWSWIFLFLLSGTTGVLSEVQLQQSGPELVKPGASVKISCKTSGYTFTEYTIHWVKQSHGESLEWIGGINPNDGGTIYNQKFKGKATLTVDKSSKTAYMELRSLTSEDSAVFYCARGPSARFPYWGQGTLVTVSAAKTTPPSVYPLAPGSAAQTNSMVTLGCLVKGYFPEPVTVTWNSGSLSSGVHTFPAVLQSDLYTLSSSVTVPSSTWPSETVTCNVAHPASSTKVDKKIVPRDCGCKPCICTVPEVSSVFIFPPKPKDVLTITLTPKVTCVVVDISKDDPEVQFSWFVDDVEVHTAQTQPREEQFNSTFRSVSELPIMHQDWLNGKEFKCRVNSAAFPAPIEKTISKTKGRPKAPQVYTIPPPKEQMAKDKVSLTCMITDFFPEDITVEWQWNGQPAENYKNTQPIMDTDGSYFVYSKLNVQKSNWEAGNTFTCSVLHEGLHNHHTEKSLSHSPGRKRREGRGSLLTCGDVEENPGPMMSPAQFLFLLVLWIRETNGDVVMTQTPLTLSVTIGQPASISCKSSQSLLDSDGKTYLNWLLQRPGQSPKRLIYLVSKLDSGVPDRFTGSGSGTDFTLKISRVEAEDLGVYYCWQGTHFPRTFGGGTKLEIKRADAAPTVSIFPPSSEQLTSGGASVVCFLNNFYPKDINVKWKIDGSERQNGVLNSWTDQDSKDSTYSMSSTLTLTKDEYERHNSYTCEATHKTSTSPIVKSFNRNEC

SEQ ID NO: 1989 - DNA, 2174 bp, synthetic construct
  source 1..2174: mol_type = other DNA
gaggagccaccatgggctggagctggatcttcctgttcctgctgagcggcaccaccggcgtgctgagcgaggtgcagctgcagcagagcggccccgagctggtgaagcccggcgccagcgtgaagatcagctgcaagaccagcggctacaccttcaccgagtacaccatccactgggtgaagcagagccacggcgagagcctggagtggatcggcggcatcaaccccaacgacggcggcaccatctacaaccagaagttcaagggcaaggccaccctgaccgtggacaagagcagcaagaccgcctacatggagctgcggagcctgaccagcgaggacagcgccgtgttctactgcgctcggggccccagcgcccggttcccctactggggccagggcaccctggtgaccgtgagcgccgccaagaccacaccacccagcgtgtacccactggctccaggcagcgctgcccaaaccaacagcatggtgaccctgggctgcctggtgaagggctacttccccgagcccgtgaccgtgacctggaacagcggcagcctgagcagcggcgtgcacaccttcccagctgtgctccagtccgacctgtacaccctgagcagcagcgtgaccgtgcccagcagcacctggcccagcgagaccgtgacctgcaacgtggcccaccccgccagcagcaccaaggtggacaagaagatcgtgccccgggactgcggctgcaagccctgcatctgcaccgtgcctgaggtctccagcgtgttcatcttcccccccaagcccaaggacgtgctgaccatcaccctgacccctaaagtcacctgcgtggtggtggacatcagcaaggacgaccccgaggtgcagttcagctggttcgtggacgacgtggaggtgcacaccgcccagacccagccccgggaggagcagttcaacagcaccttccggagcgtgagcgagctgcccatcatgcaccaggactggctgaacggcaaggagttcaagtgccgggtgaacagcgccgccttccccgcccccatcgagaagaccatcagcaagaccaagggccgacccaaggccccacaggtgtacaccatcccaccacccaaggagcagatggccaaggacaaagtcagcctgacctgcatgatcaccgacttcttccccgaggacatcaccgtggagtggcagtggaacggccagccagccgagaactacaagaacacccagcccatcatggacaccgacggcagctacttcgtgtacagcaagctgaacgtgcagaagagcaactgggaggccggcaacaccttcacctgcagcgtgctgcacgagggcctgcacaaccaccacaccgagaagagcctgagccacagccccggacggaagcggcgcgagggacggggcagcctgctgacctgcggcgacgtggaggagaacccaggccccatgatgagcccagcccagttcctgttcctgctggtgctgtggatccgggagaccaacggcgacgtggtgatgacccagaccccactgaccctgagcgtgaccatcggccagcccgccagcatcagctgcaagagcagccagagcctgctggacagcgacggcaagacctacctgaactggctgctgcagcggccaggccagagccccaagcggctgatctatctcgtcagcaagctggacagcggcgtgcccgaccggttcaccggcagcggcagcggcaccgacttcaccctgaagatcagccgggtggaggccgaggacctgggcgtgtactactgctggcagggcacccactttccccggaccttcggcggcggcaccaagctggagatcaagcgggccgacgccgccccaacagtcagcatctttccaccatcctccgagcagctcaccagcggcggcgccagcgtggtgtgcttcctgaacaacttctaccccaaggacatcaacgtgaagtggaagatcgacggcagcgagcggcagaacggcgtgctgaacagctggaccgaccaggacagcaaggacagcacctacagcatgagcagcaccctgaccctgaccaaggacgagtacgagcggcacaacagctacacctgcgaggccacccacaagaccagcaccagccccatcgtgaagagcttcaaccggaacgagtgctga

SEQ ID NO: 1990-2024 - skipped (35 entries)

SEQ ID NO: 2025 - DNA, 3962 bp, synthetic construct
  source 1..3962: mol_type = other DNA
ctgcgcgctcgctcgctcactgaggccgcccgggcaaagcccgggcgtcgggcgacctttggtcgcccggcctcagtgagcgagcgagcgcgcagagagggagtggccaactccatcactaggggttccttgtagttaatgattaacccgccatgctacttatctaccagggtaatggggatcctctagaactatagctagtcgacattgattattgactagttattaatagtaatcaattacggggtcattagttcatagcccatatatggagttccgcgttacataacttacggtaaatggcccgcctggctgaccgcccaacgacccccgcccattgacgtcaataatgacgtatgttcccatagtaacgccaatagggactttccattgacgtcaatgggtggagtatttacggtaaactgcccacttggcagtacatcaagtgtatcatatgccaagtacgccccctattgacgtcaatgacggtaaatggcccgcctggcattatgcccagtacatgaccttatgggactttcctacttggcagtacatctacgtattagtcatcgctattaccatgtcgaggccacgttctgcttcactctccccatctcccccccctccccacccccaattttgtatttatttattttttaattattttgtgcagcgatgggggcggggggggggggcgcgcgccaggcggggcggggcggggcgaggggcggggcggggcgaggcggagaggtgcggcggcagccaatcagagcggcgcgctccgaaagtttccttttatggcgaggcggcggcggcggcggccctataaaaagcgaagcgcgcggcgggcgggagcaagcttcgtttagtgaaccgtcagatcgcctggagacgccatccacgctgttttgacctccatagaagacaccgggaccgatccagcctccgcggattcgaatcccggccgggaacggtgcattggaacgcggattccccgtgccaagagtgacgtaagtaccgcctatagagtctataggcccacaaaaaatgctttcttcttttaatatacttttttgtttatcttatttctaatactttccctaatctctttctttcagggcaataatgatacaatgtatcatgcctctttgcaccattctaaagaataacagtgataatttctgggttaaggcaatagcaatatttctgcatataaatatttctgcatataaattgtaactgatgtaagaggtttcatattgctaatagcagctacaatccagctaccattctgcttttattttatggttgggataaggctggattattctgagtccaagctaggcccttttgctaatcatgttcatacctcttatcttcctcccacagctcctgggcaacgtgctggtctgtgtgctggcccatcactttggcaaagaattgggattcgaaccggtgccgccaccatgaacttcgggctcagcttgattttccttgtccttgttttaaaaggtgtccagtgtcaagtgcagctgcagcagcctggcaccgagctggtgaaacctggatctagcgtgaatctgagctgcaaggccagcggctttaccttcaccagatactggatgcactgggtcaaggaacggccaggccacggcctggaatggatcggcaatatcaaccccaacaacggcggaacagatttcaacgagaagttcaagaacaaggctacactgaccgtgcacaaaagctccaccaccgtgttcatccagctgagctctctgacaagcgaggacagcgccgtgtactattgtgccagaggcaccggcaccggcgccatggactactggggccagggaacatctgtgacagtgtccagcgccaaaacgacacccccatctgtctatccactggcccctggatctgctgcccaaactaactccatggtgaccctgggatgcctggtcaagggctatttccctgagccagtgacagtgacctggaactctggatccctgtccagcggtgtgcacaccttcccagctgtcctgcagtctgacctctacactctgagcagctcagtgactgtcccctccagcacctggcccagcgagaccgtcacctgcaacgttgcccacccggccagcagcaccaaggtggacaagaaaattgtgcccagggattgtggttgtaagccttgcatatgtacagtcccagaagtatcatctgtcttcatcttccccccaaagcccaaggatgtgctcaccattactctgactcctaaggtcacgtgtgttgtggtagacatcagcaaggatgatcccgaggtccagttcagctggtttgtagatgatgtggaggtgcacacagctcagacgcaaccccgggaggagcagttcaacagcactttccgctcagtcagtgaacttcccatcatgcaccaggactggctcaatggcaaggagttcaaatgcagggtcaacagtgcagctttccctgcccccatcgagaaaaccatctccaaaaccaaaggcagaccgaaggctccacaggtgtacaccattccacctcccaaggagcagatggccaaggataaagtcagtctgacctgcatgataacagacttcttccctgaagacattactgtggagtggcagtggaatgggcagccagcggagaactacaagaacactcagcccatcatggacacagatggctcttacttcgtctacagcaagctcaatgtgcagaagagcaactgggaggcaggaaatactttcacctgctctgtgttacatgagggcctgcacaaccaccatactgagaagagcctctcccactctcctggtagaaagaggcgagagggcagaggaagtcttctaacatgcggtgacgtggaggagaatcccggccctatgaagttgcctgttaggctgttggtgctgatgttctggattcctgcttccagcagtgatgtggtgatgacacagacccctctgagcctgcctgtgtccctcggcgaccaggccagcatcagctgtagaagcagccaatctctggtgcacaacaatggcatcacctacctgtactggtatctgcagaaacctggccagagccccaagctgctgatctaccgggtgtccaatcggttcagcggagtgccagatagatttggcggatctggcagcggcaccgacttcaccctgaagatctctagagtcgaggccgaggacctgggcgtgtacttctgcttccagggcacacacgtgcccagaaccttcggcggcggaacaaagctggaaatcaagcgggctgatgctgcaccaactgtatccatcttcccaccatccagtgagcagttaacatctggaggtgcctcagtcgtgtgcttcttgaacaacttctaccccaaagacatcaatgtcaagtggaagattgatggcagtgaacgacaaaatggcgtcctgaacagttggactgatcaggacagcaaagacagcacctacagcatgagcagcaccctcacgttgaccaaggacgagtatgaacgacataacagctatacctgtgaggccactcacaagacatcaacttcacccattgtcaagagcttcaacaggaatgagtgttaactcgaggacggggtgaactacgcctgaggatccgatctttttccctctgccaaaaattatggggacatcatgaagccccttgagcatctgacttctggctaataaaggaaatttattttcattgcaatagtgtgttggaattttttgtgtctctcactcggcctaggtagataagtagcatggcgggttaatcattaactacaaggaacccctagtgatggagttggccactccctctctgcgcgctcgctcgctcactgaggccgggcgaccaaaggtcgcccgacgcccgggctttgcccgggcggcctcagtgagcgagcgagcgcgcag

SEQ ID NO: 2026 - DNA, 130 bp, synthetic construct
  source 1..130: mol_type = other DNA
ctgcgcgctcgctcgctcactgaggccgcccgggcaaagcccgggcgtcgggcgacctttggtcgcccggcctcagtgagcgagcgagcgcgcagagagggagtggccaactccatcactaggggttcct

SEQ ID NO: 2027 - DNA, 380 bp, synthetic construct
  source 1..380: mol_type = other DNA
gacattgattattgactagttattaatagtaatcaattacggggtcattagttcatagcccatatatggagttccgcgttacataacttacggtaaatggcccgcctggctgaccgcccaacgacccccgcccattgacgtcaataatgacgtatgttcccatagtaacgccaatagggactttccattgacgtcaatgggtggagtatttacggtaaactgcccacttggcagtacatcaagtgtatcatatgccaagtacgccccctattgacgtcaatgacggtaaatggcccgcctggcattatgcccagtacatgaccttatgggactttcctacttggcagtacatctacgtattagtcatcgctattaccatg

SEQ ID NO: 2028 - DNA, 260 bp, synthetic construct
  source 1..260: mol_type = other DNA
ccacgttctgcttcactctccccatctcccccccctccccacccccaattttgtatttatttattttttaattattttgtgcagcgatgggggcggggggggggggcgcgcgccaggcggggcggggcggggcgaggggcggggcggggcgaggcggagaggtgcggcggcagccaatcagagcggcgcgctccgaaagtttccttttatggcgaggcggcggcggcggcggccctataaaaagcgaagcgcgcggcggg

SEQ ID NO: 2029 - DNA, 566 bp, synthetic construct
  source 1..566: mol_type = other DNA
tcagatcgcctggagacgccatccacgctgttttgacctccatagaagacaccgggaccgatccagcctccgcggattcgaatcccggccgggaacggtgcattggaacgcggattccccgtgccaagagtgacgtaagtaccgcctatagagtctataggcccacaaaaaatgctttcttcttttaatatacttttttgtttatcttatttctaatactttccctaatctctttctttcagggcaataatgatacaatgtatcatgcctctttgcaccattctaaagaataacagtgataatttctgggttaaggcaatagcaatatttctgcatataaatatttctgcatataaattgtaactgatgtaagaggtttcatattgctaatagcagctacaatccagctaccattctgcttttattttatggttgggataaggctggattattctgagtccaagctaggcccttttgctaatcatgttcatacctcttatcttcctcccacagctcctgggcaacgtgctggtctgtgtgctggcccatcactttggcaaagaatt

SEQ ID NO: 2030 - DNA, 57 bp, synthetic construct; identical to SEQ ID NO: 1740
  source 1..57: mol_type = other DNA

SEQ ID NO: 2031 - DNA, 354 bp, synthetic construct
  source 1..354: mol_type = other DNA
caagtgcagctgcagcagcctggcaccgagctggtgaaacctggatctagcgtgaatctgagctgcaaggccagcggctttaccttcaccagatactggatgcactgggtcaaggaacggccaggccacggcctggaatggatcggcaatatcaaccccaacaacggcggaacagatttcaacgagaagttcaagaacaaggctacactgaccgtgcacaaaagctccaccaccgtgttcatccagctgagctctctgacaagcgaggacagcgccgtgtactattgtgccagaggcaccggcaccggcgccatggactactggggccagggaacatctgtgacagtgtccagc

SEQ ID NO: 2032 - DNA, 969 bp, synthetic construct; identical to SEQ ID NO: 1742
  source 1..969: mol_type = other DNA

SEQ ID NO: 2033 - DNA, 12 bp, synthetic construct
  source 1..12: mol_type = other DNA
agaaagaggcga

SEQ ID NO: 2034 - DNA, 54 bp, synthetic construct
  source 1..54: mol_type = other DNA
gagggcagaggaagtcttctaacatgcggtgacgtggaggagaatcccggccct

SEQ ID NO: 2035 - DNA, 57 bp, synthetic construct; identical to SEQ ID NO: 1861
  source 1..57: mol_type = other DNA

SEQ ID NO: 2036 - DNA, 336 bp, synthetic construct
  source 1..336: mol_type = other DNA
gatgtggtgatgacacagacccctctgagcctgcctgtgtccctcggcgaccaggccagcatcagctgtagaagcagccaatctctggtgcacaacaatggcatcacctacctgtactggtatctgcagaaacctggccagagccccaagctgctgatctaccgggtgtccaatcggttcagcggagtgccagatagatttggcggatctggcagcggcaccgacttcaccctgaagatctctagagtcgaggccgaggacctgggcgtgtacttctgcttccagggcacacacgtgcccagaaccttcggcggcggaacaaagctggaaatcaag

SEQ ID NO: 2037 - DNA, 321 bp, synthetic construct; identical to SEQ ID NO: 1864
  source 1..321: mol_type = other DNA

SEQ ID NO: 2038 - DNA, 127 bp, synthetic construct
  source 1..127: mol_type = other DNA
gatctttttccctctgccaaaaattatggggacatcatgaagccccttgagcatctgacttctggctaataaaggaaatttattttcattgcaatagtgtgttggaattttttgtgtctctcactcg

SEQ ID NO: 2039 - DNA, 130 bp, synthetic construct
  source 1..130: mol_type = other DNA
aggaacccctagtgatggagttggccactccctctctgcgcgctcgctcgctcactgaggccgggcgaccaaaggtcgcccgacgcccgggctttgcccgggcggcctcagtgagcgagcgagcgcgcag

SEQ ID NO: 2040 - protein, 19 aa, synthetic construct
MNFGLSLIFLVLVLKGVQC

SEQ ID NO: 2041 - protein, 118 aa, synthetic construct; identical to SEQ ID NO: 1562

SEQ ID NO: 2042 - protein, 323 aa, synthetic construct
AKTTPPSVYPLAPGSAAQTNSMVTLGCLVKGYFPEPVTVTWNSGSLSSGVHTFPAVLQSDLYTLSSSVTVPSSTWPSETVTCNVAHPASSTKVDKKIVPRDCGCKPCICTVPEVSSVFIFPPKPKDVLTITLTPKVTCVVVDISKDDPEVQFSWFVDDVEVHTAQTQPREEQFNSTFRSVSELPIMHQDWLNGKEFKCRVNSAAFPAPIEKTISKTKGRPKAPQVYTIPPPKEQMAKDKVSLTCMITDFFPEDITVEWQWNGQPAENYKNTQPIMDTDGSYFVYSKLNVQKSNWEAGNTFTCSVLHEGLHNHHTEKSLSHSPG

SEQ ID NO: 2043 - protein, 19 aa, synthetic construct
MKLPVRLLVLMFWIPASSS

SEQ ID NO: 2044 - protein, 112 aa, synthetic construct; identical to SEQ ID NO: 1573

SEQ ID NO: 2045 - protein, 107 aa, synthetic construct
RADAAPTVSIFPPSSEQLTSGGASVVCFLNNFYPKDINVKWKIDGSERQNGVLNSWTDQDSKDSTYSMSSTLTLTKDEYERHNSYTCEATHKTSTSPIVKSFNRNEC

SEQ ID NO: 2046-2126 - skipped (81 entries)

SEQ ID NO: 2127 - protein, 441 aa, Homo sapiens
MAEPRQEFEVMEDHAGTYGLGDRKDQGGYTMHQDQEGDTDAGLKESPLQTPTEDGSEEPGSETSDAKSTPTAEDVTAPLVDEGAPGKQAAAQPHTEIPEGTTAEEAGIGDTPSLEDEAAGHVTQARMVSKSKDGTGSDDKKAKGADGKTKIATPRGAAPPGQKGQANATRIPAKTPPAPKTPPSSGEPPKSGDRSGYSSPGSPGTPGSRSRTPSLPTPPTREPKKVAVVRTPPKSPSSAKSRLQTAPVPMPDLKNVKSKIGSTENLKHQPGGGKVQIINKKLDLSNVQSKCGSKDNIKHVPGGGSVQIVYKPVDLSKVTSKCGSLGNIHHKPGGGQVEVKSEKLDFKDRVQSKIGSLDNITHVPGGGNKKIETHKLTFRENAKAKTDHGAEIVYKSPVVSGDTSPRHLSNVSSTGSIDMVDSPQLATLADEVSASLAKQGL

SEQ ID NO: 2128 - protein, 18 aa, synthetic construct
  SITE 11: note = phosphorylated threonine
SPGTPGSRSRTPSLPTPP

SEQ ID NO: 2129 - protein, 15 aa, synthetic construct
  SITE 8: note = phosphorylated threonine
SRTPSLPTPPTREPK

SEQ ID NO: 2130 - protein, 15 aa, synthetic construct
  SITE 8: note = phosphorylated threonine
KKVAVVRTPPKSPSS

SEQ ID NO: 2131 - protein, 20 aa, synthetic construct
  SITE 8: note = phosphorylated threonine
  SITE 13: note = phosphorylated threonine
TPGSRSRTPSLPTPPTREPK

SEQ ID NO: 2132 - protein, 29 aa, synthetic construct
  SITE 8: note = phosphorylated threonine
  SITE 22: note = phosphorylated threonine
SRTPSLPTPPTREPKKVAVVRTPPKSPSS

SEQ ID NO: 2133 - protein, 34 aa, synthetic construct
  SITE 8: note = phosphorylated threonine
  SITE 13: note = phosphorylated threonine
  SITE 27: note = phosphorylated threonine
TPGSRSRTPSLPTPPTREPKKVAVVRTPPKSPSS

SEQ ID NO: 2134 - protein, 34 aa, synthetic construct; identical to SEQ ID NO: 2133

SEQ ID NO: 2135 - protein, 34 aa, synthetic construct; identical to SEQ ID NO: 2133
  SITE 8: note = phosphorylated threonine
  SITE 27: note = phosphorylated threonine

SEQ ID NO: 2136 - protein, 49 aa, synthetic construct
TPPSSGEPPKSGDRSGYSSPGSPGTPGSRSRTPSLPTPPTREPKKVAVV

SEQ ID NO: 2137 - protein, 20 aa, synthetic construct
  SITE 8: note = phosphorylated threonine
  SITE 13: note = phosphorylated threonine
TPGSRSRTPSLPTPPTREPK

SEQ ID NO: 2138 - protein, 19 aa, synthetic construct
  SITE 9: note = phosphorylated threonine
  SITE 11: note = phosphorylated serine
  SITE 14: note = phosphorylated threonine
GTPGSRSRTPSLPTPPTRE

SEQ ID NO: 2139 - protein, 37 aa, synthetic construct
  SITE 18: note = phosphorylated serine
  SITE 26: note = phosphorylated serine
  SITE 31: note = phosphorylated serine
RENAKAKTDHGAEIVYKSPVVSGDTSPRHLSNVSSTG

SEQ ID NO: 2140 - protein, 8 aa, unidentified
PTREPKKV

SEQ ID NO: 2141 - protein, 7 aa, unidentified
ARMVSKS

SEQ ID NO: 2142 - protein, 24 aa, unidentified
SPSSAKSRLQTAPVPMPDLKNVKS

SEQ ID NO: 2143 - protein, 29 aa, synthetic construct
  SITE 18: note = phosphorylated serine
DHGAEIVYKSPVVSGDTSPRHLSNVSSTG

SEQ ID NO: 2144 - protein, 16 aa, synthetic construct
  SITE 4: note = phosphorylated threonine
  SITE 9: note = phosphorylated threonine
CSRTPSLPTPPTREPK

SEQ ID NO: 2145 - protein, 18 aa, synthetic construct
  SITE 3: note = phosphorylated serine
  SITE 6: note = phosphorylated serine
  SITE 7: note = phosphorylated serine
  SITE 10: note = phosphorylated serine
  SITE 13: note = phosphorylated threonine
  SITE 16: note = phosphorylated serine
  SITE 18: note = phosphorylated serine
DRSGYSSPGSPGTPGSRS

SEQ ID NO: 2146 - protein, 24 aa, synthetic construct
  SITE 9: note = phosphorylated serine
SGDRSGYSSPGSPGTPGSRSRTPS

SEQ ID NO: 2147 - protein, 24 aa, synthetic construct
  SITE 12: note = phosphorylated serine
SGDRSGYSSPGSPGTPGSRSRTPS

SEQ ID NO: 2148 - protein, 24 aa, synthetic construct
  SITE 15: note = phosphorylated threonine
SGDRSGYSSPGSPGTPGSRSRTPS

SEQ ID NO: 2149 - protein, 24 aa, synthetic construct
  SITE 9: note = phosphorylated serine
  SITE 12: note = phosphorylated serine
  SITE 15: note = phosphorylated threonine
SGDRSGYSSPGSPGTPGSRSRTPS

SEQ ID NO: 2150 - protein, 24 aa, synthetic construct
  SITE 9: note = phosphorylated serine
  SITE 12: note = phosphorylated serine
SGDRSGYSSPGSPGTPGSRSRTPS

SEQ ID NO: 2151 - protein, 24 aa, synthetic construct
  SITE 12: note = phosphorylated serine
  SITE 15: note = phosphorylated threonine
SGDRSGYSSPGSPGTPGSRSRTPS

SEQ ID NO: 2152 - protein, 24 aa, synthetic construct
  SITE 9: note = phosphorylated serine
  SITE 15: note = phosphorylated threonine
SGDRSGYSSPGSPGTPGSRSRTPS

SEQ ID NO: 2153 - protein, 19 aa, synthetic construct
  SITE 9: note = phosphorylated threonine
GTPGSRSRTPSLPTPPTRE

SEQ ID NO: 2154 - protein, 19 aa, synthetic construct
  SITE 11: note = phosphorylated serine
GTPGSRSRTPSLPTPPTRE

SEQ ID NO: 2155 - protein, 19 aa, synthetic construct
  SITE 14: note = phosphorylated threonine
GTPGSRSRTPSLPTPPTRE

SEQ ID NO: 2156 - protein, 19 aa, synthetic construct
  SITE 9: note = phosphorylated threonine
  SITE 11: note = phosphorylated serine
GTPGSRSRTPSLPTPPTRE

SEQ ID NO: 2157 - protein, 19 aa, synthetic construct
  SITE 9: note = phosphorylated threonine
  SITE 14: note = phosphorylated threonine
GTPGSRSRTPSLPTPPTRE

SEQ ID NO: 2158 - protein, 19 aa, synthetic construct
  SITE 11: note = phosphorylated serine
  SITE 14: note = phosphorylated threonine
GTPGSRSRTPSLPTPPTRE

SEQ ID NO: 2159 - protein, 19 aa, synthetic construct
  SITE 9: note = phosphorylated threonine
  SITE 11: note = phosphorylated serine
  SITE 14: note = phosphorylated threonine
GTPGSRSRTPSLPTPPTRE

SEQ ID NO: 2160 - protein, 18 aa, synthetic construct
  SITE 1: note = phosphorylated threonine
  SITE 4: note = phosphorylated threonine
  SITE 15: note = phosphorylated threonine
TPPTREPKKVAVVRTPPK

SEQ ID NO: 2161 - protein, 16 aa, synthetic construct
  SITE 7: note = phosphorylated threonine
KVAVVRTPPKSPSSAK

SEQ ID NO: 2162 - protein, 18 aa, synthetic construct
  SITE 11: note = phosphorylated serine
KVAVVRTPPKSPSSAKPS

SEQ ID NO: 2163 - protein, 18 aa, synthetic construct
  SITE 7: note = phosphorylated threonine
  SITE 11: note = phosphorylated serine
KVAVVRTPPKSPSSAKPS

SEQ ID NO: 2164-2168 - skipped (5 entries)

SEQ ID NO: 2169 - DNA, 435 bp, synthetic construct
  source 1..435: mol_type = other DNA
atggcgacgggttcaagaacttccctacttcttgcatttggcctgctttgtttgccgtggttacaggagggctcggcagctgccgaggtccagctgcaacagtctggacctgagctggtgaagcctggggcttcagtgaagatatcctgcaagacttctggatacacattcactgaatacaccatacactgggtgaagcagagccatggagagagccttgagtggattggaggtattaatccaaacgatggtggtactatttacaaccagaagttcaagggcaaggccacattgactgtagacaagtcctccaaaacagcctacatggagctccgcagcctgacatctgaggattctgcagtcttttactgtgcaagagggccctccgccaggtttccttactggggccaagggactctggtcactgtctctgca

SEQ ID NO: 2170 - DNA, 408 bp, synthetic construct
  source 1..408: mol_type = other DNA
atgggatggagctggatctttctctttctcctgtcaggaactacaggtgtcctctctgaggtccagctgcaacagtctggacctgagctggtgaagcctggggcttcagtgaagatatcctgcaagacttctggatacacattcactgaatacaccatacactgggtgaagcagagccatggagagagccttgagtggattggaggtattaatccaaacgatggtggtactatttacaaccagaagttcaagggcaaggccacattgactgtagacaagtcctccaaaacagcctacatggagctccgcagcctgacatctgaggattctgcagtcttttactgtgcaagagggccctccgccaggtttccttactggggccaagggactctggtcactgtctctgca

SEQ ID NO: 2171-2199 - skipped (29 entries)

SEQ ID NO: 2200 - protein, 8 aa, synthetic construct
GGSISNYY

SEQ ID NO: 2201 - protein, 7 aa, synthetic construct
VYTSGSA

SEQ ID NO: 2202 - protein, 8 aa, synthetic construct
ARDRGLYY

SEQ ID NO: 2203 - protein, 25 aa, synthetic construct
QVQLQESGPGLVKPSETLSLTCTVS

SEQ ID NO: 2204 - protein, 17 aa, synthetic construct
WTWIRQPAGKGLEWIGR

SEQ ID NO: 2205 - protein, 38 aa, synthetic construct
NYNPSLKSRVTMSVDTSKNQFSLTLSSVTAADTAVYYC

SEQ ID NO: 2206 - protein, 11 aa, synthetic construct
WGQGTLVTVSS

SEQ ID NO: 2207 - protein, 11 aa, synthetic construct
QSLVHSDGNTY

SEQ ID NO: 2208 - skipped

SEQ ID NO: 2209 - protein, 9 aa, synthetic construct
MQATQFPLT

SEQ ID NO: 2210 - protein, 26 aa, synthetic construct
DIVMTQTPLSSLVTLGQPASISCRSS

SEQ ID NO: 2211 - protein, 17 aa, synthetic construct
LSWLQQRPGQPPRLLIY

SEQ ID NO: 2212 - protein, 36 aa, synthetic construct
KRFFGVPDRFSGSGAGTDFTLKINRVEAEDVGIYYC

SEQ ID NO: 2213 - protein, 10 aa, synthetic construct
FGGGTKVEIK

SEQ ID NO: 2214 - protein, 114 aa, synthetic construct
QVQLQESGPGLVKPSETLSLTCTVSGGSISNYYWTWIRQPAGKGLEWIGRVYTSGSANYNPSLKSRVTMSVDTSKNQFSLTLSSVTAADTAVYYCARDRGLYYWGQGTLVTVSS

SEQ ID NO: 2215 - protein, 112 aa, synthetic construct
DIVMTQTPLSSLVTLGQPASISCRSSQSLVHSDGNTYLSWLQQRPGQPPRLLIYKISKRFFGVPDRFSGSGAGTDFTLKINRVEAEDVGIYYCMQATQFPLTFGGGTKVEIK

SEQ ID NO: 2216 - DNA, 342 bp, synthetic construct
  source 1..342: mol_type = other DNA
caggtgcagctgcaggagtcgggcccaggactggtgaagccttcggagaccctgtccctcacctgcactgtctctggtggctccatcagtaattactactggacctggatccggcagcccgccgggaagggactggagtggattgggcgtgtctataccagtgggagcgccaactacaacccctccctcaagagtcgagttaccatgtcagtagacacgtccaagaaccagttctccctgacgctgagctctgtgaccgccgcggacacggccgtgtattactgtgcgagagatagaggactctactactggggccagggaaccctggtcaccgtctcctca

SEQ ID NO: 2217 - DNA, 336 bp, synthetic construct
  source 1..336: mol_type = other DNA
gatattgtgatgacccagactccactctcctcacttgtcacccttggacagccggcctccatctcctgcaggtctagtcaaagcctcgtacacagtgatggaaacacctatttgagttggcttcagcagaggccaggccagcctccaagactcctaatttataagatttctaagcggttctttggggtcccagacagattcagtggcagtggggcagggacagatttcacactgaaaatcaacagggtggaagctgaggatgtcgggatttattactgcatgcaagctacacaatttccgctcactttcggcggagggaccaaggtggagatcaaa

SEQ ID NO: 2218 - protein, 8 aa, synthetic construct
RFTFSNYN

SEQ ID NO: 2219 - protein, 8 aa, synthetic construct
ISSSSSTI

SEQ ID NO: 2220 - protein, 7 aa, synthetic construct
ASLGRGY

SEQ ID NO: 2221 - protein, 25 aa, synthetic construct [sequence omitted]

SEQ ID NO: 2222 - protein, 17 aa, synthetic construct
MNWVRQAPGKGLEWISY

SEQ ID NO: 2223 - protein, 38 aa, synthetic construct
YYADSVKGRFTISRDNAKNSLSLQMNSLRDEDTAVYYC

SEQ ID NO: 2224 - protein, 9 aa, synthetic construct
MQATQFPRT

SEQ ID NO: 2225 - protein, 26 aa, synthetic construct
DIVMTQTPLSSPVTLGQPASISCRSS

SEQ ID NO: 2226 - protein, 36 aa, synthetic construct
NRFSGVPDRFSGSGAGTDFTLKISRVEAEDVGVYYC

SEQ ID NO: 2227 - protein, 10 aa, synthetic construct
FGQGSKLEIK

SEQ ID NO: 2228 - protein, 114 aa, synthetic construct
EVQLVESGGGLVQPGGSLRLSCAASRFTFSNYNMNWVRQAPGKGLEWISYISSSSSTIYYADSVKGRFTISRDNAKNSLSLQMNSLRDEDTAVYYCASLGRGYWGQGTLVTVSS

SEQ ID NO: 2229 - protein, 112 aa, synthetic construct
DIVMTQTPLSSPVTLGQPASISCRSSQSLVHSDGNTYLSWLQQRPGQPPRLLIYKISNRFSGVPDRFSGSGAGTDFTLKISRVEAEDVGVYYCMQATQFPRTFGQGSKLEIK

SEQ ID NO: 2230 - DNA, 342 bp, synthetic construct
  source 1..342: mol_type = other DNA
gaggtgcagctggtggagtctgggggaggcttggtacagcctggggggtccctgagactctcctgtgcagcctctagattcaccttcagtaactataacatgaactgggtccgccaggctccagggaaggggctggagtggatttcatacattagtagtagtagtagtaccatatactacgcagactctgtgaagggccgattcaccatctccagagacaatgccaagaactcactgtctctgcaaatgaacagcctgagagacgaggacacggctgtgtattactgtgcgagtctggggaggggctactggggccagggaaccctggtcaccgtctcctca

SEQ ID NO: 2231 - DNA, 336 bp, synthetic construct
  source 1..336: mol_type = other DNA
gatattgtgatgacccagactccactctcctcacctgtcacccttggacagccggcctccatctcctgcaggtctagtcaaagcctcgtacacagtgatggaaacacctacttgagttggcttcagcagaggccaggccagcctccaagactcctaatttataagatttctaaccggttctctggggtcccagacagattcagtggcagtggggcagggacagatttcacactgaaaatcagcagggtggaagctgaggatgtcggggtttattattgtatgcaagctactcaatttcctcgcacttttggccaggggtccaagctggagatcaaa

SEQ ID NO: 2232 - protein, 8 aa, synthetic construct
GFTFSDYS

SEQ ID NO: 2233 - protein, 8 aa, synthetic construct
IRSSSSII

SEQ ID NO: 2234 - protein, 8 aa, synthetic construct
ARRGHFDY

SEQ ID NO: 2235 - protein, 25 aa, synthetic construct
EVQLVESGGGLVQAGGSLRLSCAAS

SEQ ID NO: 2236 - protein, 17 aa, synthetic construct
MNWVRQAPGKGLEWVSY

SEQ ID NO: 2237 - protein, 38 aa, synthetic construct
YYADSVKGRFTISRDNAKNSLHLQMNSLRDEDTAVYYC

SEQ ID NO: 2238 - protein, 6 aa, synthetic construct
QSVSDY

SEQ ID NO: 2239 - skipped

SEQ ID NO: 2240 - protein, 9 aa, synthetic construct
QQRSNWPLT

SEQ ID NO: 2241 - protein, 26 aa, synthetic construct [sequence omitted]

SEQ ID NO: 2242 - protein, 17 aa, synthetic construct
LAWYQQKPGQAPRLFIY

SEQ ID NO: 2243 - protein, 36 aa, synthetic construct
KRATGIPARFSGSGSGTDFTLTISSLEPEDFAVYYC

SEQ ID NO: 2244 - protein, 115 aa, synthetic construct
EVQLVESGGGLVQAGGSLRLSCAASGFTFSDYSMNWVRQAPGKGLEWVSYIRSSSSIIYYADSVKGRFTISRDNAKNSLHLQMNSLRDEDTAVYYCARRGHFDYWGQGTLVTVSS

SEQ ID NO: 2245 - protein, 107 aa, synthetic construct
EIVLTQSPATLSLSPGERATLSCRASQSVSDYLAWYQQKPGQAPRLFIYDVSKRATGIPARFSGSGSGTDFTLTISSLEPEDFAVYYCQQRSNWPLTFGGGTKVEIK

SEQ ID NO: 2246 - DNA, 345 bp, synthetic construct
  source 1..345: mol_type = other DNA
gaggtgcagctggtggagtctgggggaggcttggtacaggctggggggtccctgagactctcctgtgcagcctctggattcaccttcagtgactatagcatgaactgggtccgccaggctccagggaaggggctggagtgggtttcatatattaggagtagtagtagtatcatatactacgcagactctgtgaagggccgattcaccatctccagagacaatgccaagaactcactgcatttgcaaatgaacagcctgagagacgaggacacggctgtgtattactgtgcgagacggggtcactttgactactggggccagggaaccctggtcaccgtctcctca

SEQ ID NO: 2247 - DNA, 321 bp, synthetic construct
  source 1..321: mol_type = other DNA
gaaattgtgttgacacagtctccagccaccctgtctttgtctccaggggaaagagccaccctctcctgcagggccagtcagagtgttagcgactacttagcctggtaccaacagaaacctggccaggctcccaggctcttcatctatgatgtatccaagagggccactggcatcccagccaggttcagtggcagtgggtctgggacagacttcactctcaccatcagcagcctagagcctgaagattttgcagtttattactgtcagcagcgtagcaactggccgctcactttcggcggagggaccaaggtggagatcaaa

SEQ ID NO: 2248 - protein, 8 aa, synthetic construct
GFTFSSYT

SEQ ID NO: 2249 - protein, 8 aa, synthetic construct
ASLGRGDC

SEQ ID NO: 2250 - protein, 38 aa, synthetic construct
YYADSVKGRFTISRDNAKNSLYLQMNSLRDEDTAVYYC

SEQ ID NO: 2251 - protein, 36 aa, synthetic construct
KRFSGVPDRFSGSGAGTDFTLKISRVEAEDVGVYYC

SEQ ID NO: 2252 - protein, 10 aa, synthetic construct
FGQGTRLEIK

SEQ ID NO: 2253 - protein, 115 aa, synthetic construct
EVQLVESGGGLVQPGGSLRLSCAASGFTFSSYTMNWVRQAPGKGLEWVSYISSSSSTIYYADSVKGRFTISRDNAKNSLYLQMNSLRDEDTAVYYCASLGRGDCWGQGTLVTVSS

SEQ ID NO: 2254 - protein, 112 aa, synthetic construct
DIVMTQTPLSSPVTLGQPASISCRSSQSLVHSDGNTYLSWLQQRPGQPPRLLIYKISKRFSGVPDRFSGSGAGTDFTLKISRVEAEDVGVYYCMQATQFPRTFGQGTRLEIK

SEQ ID NO: 2255 - DNA, 345 bp, synthetic construct
  source 1..345: mol_type = other DNA
gaggtgcagctggtggagtctgggggaggcttggtacagcctggggggtccctgagactctcctgtgcagcctctggattcaccttcagtagttataccatgaactgggtccgccaggctccagggaaggggctggagtgggtttcatacattagtagtagtagtagtaccatatactacgcagactctgtgaagggccgattcaccatctccagagacaatgccaagaactcactgtatctgcaaatgaacagcctgagagacgaggacacggctgtgtattactgtgcgagtctggggagaggggactgctggggccagggaaccctggtcaccgtctcctca

SEQ ID NO: 2256 - DNA, 336 bp, synthetic construct
  source 1..336: mol_type = other DNA
gatattgtgatgacccagactccactctcctcacctgtcacccttggacagccggcctccatctcctgcaggtctagtcaaagcctcgtacacagtgatggaaacacctacttgagttggcttcagcagaggccaggccagcctccaagactcctaatttataagatttctaaacggttctctggggtcccagacagattcagtggcagtggggcagggacagatttcacactgaaaatcagcagggtggaagctgaggatgtcggggtttattactgcatgcaagctacacaatttcctcggaccttcggccaagggacacgactggagattaaa

SEQ ID NO: 2257 - protein, 7 aa, synthetic construct
IYTSGDT

SEQ ID NO: 2258 - protein, 15 aa, synthetic construct
ARAGIVGTPGLGMDV

SEQ ID NO: 2259 - protein, 17 aa, synthetic construct
WSWIRQPAGKGLEWIGR

SEQ ID NO: 2260 - protein, 38 aa, synthetic construct
YYNPSLQSRVTMSVDTSKNQFSLKLSAVTAADTAVYYC

SEQ ID NO: 2261 - protein, 11 aa, synthetic construct
WGQGTTVTVSS

SEQ ID NO: 2262 - protein, 6 aa, synthetic construct
ALPKQY

SEQ ID NO: 2263 - skipped

SEQ ID NO: 2264 - protein, 11 aa, synthetic construct
QSADSSGTYRV

SEQ ID NO: 2265 - protein, 25 aa, synthetic construct
SYELTQPPSVSVSPGQTARITCSGE

SEQ ID NO: 2266 - protein, 17 aa, synthetic construct
AYWYQQKPGQAPVLVIY

SEQ ID NO: 2267 - protein, 36 aa, synthetic construct
ERPSGIPERFSGSSSGTTVTLTISGVQAEDEADYYC

SEQ ID NO: 2268 - protein, 10 aa, synthetic construct
FGGGTKLTVL

SEQ ID NO: 2269 - protein, 121 aa, synthetic construct
QVQLQESGPGLVKPSETLSLTCTVSGGSISNYYWSWIRQPAGKGLEWIGRIYTSGDTYYNPSLQSRVTMSVDTSKNQFSLKLSAVTAADTAVYYCARAGIVGTPGLGMDVWGQGTTVTVSS

SEQ ID NO: 2270 - protein, 108 aa, synthetic construct
SYELTQPPSVSVSPGQTARITCSGEALPKQYAYWYQQKPGQAPVLVIYKDSERPSGIPERFSGSSSGTTVTLTISGVQAEDEADYYCQSADSSGTYRVFGGGTKLTVL

SEQ ID NO: 2271 - DNA, 363 bp, synthetic construct
  source 1..363: mol_type = other DNA
caggtgcagctgcaggagtcgggcccaggactggtgaagccttcggagaccctgtccctcacctgcactgtctctggtggctccatcagtaattactactggagttggatccggcagcccgccgggaagggtctggagtggattgggcgtatctataccagtggggacacctactacaacccctccctccagagtcgagtcaccatgtcagtagacacgtccaagaaccagttctccctgaagctgagcgctgtgaccgccgcggacacggccgtctattactgtgcgagagcgggtatagtgggaactccgggactcggtatggacgtctggggccaagggaccacggtcaccgtctcctca

SEQ ID NO: 2272 - DNA, 324 bp, synthetic construct
  source 1..324: mol_type = other DNA
tcctatgagctgacacagccaccctcggtgtcagtgtccccaggacagacggccaggatcacctgctctggagaagcattgccaaagcaatatgcttattggtaccagcagaagccaggccaggcccctgtgctggtgatatataaagacagtgagaggccctcagggatccctgagcgattctctggctccagctcagggacaacagtcacgttgaccatcagtggagtccaggcagaagatgaggctgactattactgtcaatcagcagacagcagtggtacttatcgggtgttcggcggagggaccaagctgaccgtccta

SEQ ID NO: 2273 - protein, 8 aa, synthetic construct
GFTFSSYR

SEQ ID NO: 2274 - protein, 8 aa, synthetic construct
ISSSRSAI

SEQ ID NO: 2275 - protein, 7 aa, synthetic construct
ATLGIGY

SEQ ID NO: 2276 - protein, 25 aa, synthetic construct
EVQMVESGGGLVQPGGSLTLSCAAS

SEQ ID NO: 2277 - protein, 9 aa, synthetic construct
MQVTQFPRT

SEQ ID NO: 2278 - protein, 36 aa, synthetic construct
NRFSGVPDRFSGSGAGTDFTLKITRVEAEDVGIYYC

SEQ ID NO: 2279 - protein, 10 aa, synthetic construct
FGQGTKVEIR

SEQ ID NO: 2280 - protein, 114 aa, synthetic construct
EVQMVESGGGLVQPGGSLTLSCAASGFTFSSYRMNWVRQAPGKGLEWVSYISSSRSAIYYADSVKGRFTISRDNAKNSLYLQMNSLRDEDTAVYYCATLGIGYWGQGTLVTVSS

SEQ ID NO: 2281 - protein, 112 aa, synthetic construct
DIVMTQTPLSSPVTLGQPASISCRSSQSLVHSDGNTYLSWLQQRPGQPPRLLIYKISNRFSGVPDRFSGSGAGTDFTLKITRVEAEDVGIYYCMQVTQFPRTFGQGTKVEIR

SEQ ID NO: 2282 - DNA, 342 bp, synthetic construct
  source 1..342: mol_type = other DNA
gaggtgcagatggtggagtctgggggaggcttggtacagcctggggggtccctgacactctcctgtgcagcctctggattcaccttcagtagctatagaatgaactgggtccgccaggctccagggaaggggctggagtgggtttcatacattagcagtagtagaagtgccatatactacgcagactctgtgaagggccgattcaccatctccagagacaatgccaagaactcactgtatctgcaaatgaacagcctgagagacgaggacacggctgtgtattactgtgcgaccctggggataggctactggggccagggaaccctggtcaccgtctcctca

SEQ ID NO: 2283 - DNA, 336 bp, synthetic construct
  source 1..336: mol_type = other DNA
gatattgtgatgacccagactccactctcctcacctgtcacccttggacagccggcctccatctcctgcaggtctagtcaaagcctcgtacacagtgatggaaacacctacttgagttggcttcagcagaggccaggccagcctccaagactcctaatttataagatttctaaccggttctctggggtcccagacagattcagtggcagtggggcagggacagatttcacactgaaaatcaccagggtggaggctgaggatgtcgggatttattactgcatgcaagttacacaatttcctcggacgttcggccaagggaccaaggtggaaatcaga

SEQ ID NO: 2284 - protein, 8 aa, synthetic construct
GFTFSSYS

SEQ ID NO: 2285 - protein, 8 aa, synthetic construct
ISRSGSTI

SEQ ID NO: 2286 - protein, 7 aa, synthetic construct
ARGNWAY

SEQ ID NO: 2287 - protein, 38 aa, synthetic construct
YYADSVEGRFTISRDNAYNSLYLQMISLRDDDTAVYYC

SEQ ID NO: 2288 - protein, 11 aa, synthetic construct
WGQGILVTVSS

SEQ ID NO: 2289 - protein, 9 aa, synthetic construct
SSNIGAGYD

SEQ ID NO: 2290 - skipped

SEQ ID NO: 2291 - protein, 11 aa, synthetic construct
QSYDSSLSGSV

SEQ ID NO: 2292 - protein, 25 aa, synthetic construct
QSVLTQPPSVSGAPGQRVTISCTGS

SEQ ID NO: 2293 - protein, 17 aa, synthetic construct
VHWYQQLPGTAPKLLIY

SEQ ID NO: 2294 - protein, 36 aa, synthetic construct
NRPSGVPDRFSGSKSGTSASLAITGLQAEDETDFYC

SEQ ID NO: 2295 - protein, 114 aa, synthetic construct
EVQLVESGGGLVQPGGSLRLSCAASGFTFSSYSMNWVRQAPGKGLEWVSYISRSGSTIYYADSVEGRFTISRDNAYNSLYLQMISLRDDDTAVYYCARGNWAYWGQGILVTVSS

SEQ ID NO: 2296 - protein, 111 aa, synthetic construct
QSVLTQPPSVSGAPGQRVTISCTGSSSNIGAGYDVHWYQQLPGTAPKLLIYGNSNRPSGVPDRFSGSKSGTSASLAITGLQAEDETDFYCQSYDSSLSGSVFGGGTKLTVL

SEQ ID NO: 2297 - DNA, 342 bp, synthetic construct
  source 1..342: mol_type = other DNA
gaggtgcagctggtggagtctgggggaggcttggtacagcctggggggtccctgagactctcctgtgcagcctctggattcaccttcagtagctatagcatgaactgggtccgccaggctccagggaaggggctggagtgggtttcatacattagtcgtagtggtagtaccatatactacgcagactctgtggagggccgattcaccatctccagagacaatgcctacaactcactgtatctgcaaatgatcagcctgagagacgatgacacggctgtgtattactgtgcgagagggaactgggcctactggggccagggaatcctggtcaccgtctcctca

SEQ ID NO: 2298 - DNA, 333 bp, synthetic construct
  source 1..333: mol_type = other DNA
cagtctgtgctgacgcagccgccctcagtgtctggggccccagggcagagggtcaccatctcctgcactgggagcagctccaacatcggggcaggttatgatgtacactggtaccagcagcttccaggaacagcccccaaactcctcatctatggtaacagcaatcggccctcaggggtccctgaccgattctctggctccaagtctggcacctcagcctccctggccatcactgggctccaggctgaggatgagactgatttttactgccagtcctatgacagcagcctgagtggttcggttttcggcggagggaccaagctgaccgtcctg

SEQ ID NO: 2299 - protein, 8 aa, synthetic construct
IRSSSSTI

SEQ ID NO: 2300 - protein, 8 aa, synthetic construct
ARRSIADY

SEQ ID NO: 2301 - protein, 38 aa, synthetic construct
YYADSVKGRFTISRDNAKKSLYLQMNSLRDEDTAVYYC

SEQ ID NO: 2302 - protein, 6 aa, synthetic construct
QSVTSY

SEQ ID NO: 2303 - skipped

SEQ ID NO: 2304 - protein, 9 aa, synthetic construct
QQRSNWPYT

SEQ ID NO: 2305 - protein, 26 aa, synthetic construct
EIVLTQSPATLSSSPGERATLSCRAS

SEQ ID NO: 2306 - protein, 17 aa, synthetic construct
LNWYQQKPGQAPRLLIY

SEQ ID NO: 2307 - protein, 36 aa, synthetic construct
NRATGIPARFSGSGSGTDFTLTISSLEPEDFALYYC

SEQ ID NO: 2308 - protein, 10 aa, synthetic construct
FGQGTKLEIK

SEQ ID NO: 2309 - protein, 115 aa, synthetic construct
EVQLVESGGGLVQPGGSLRLSCAASGFTFSSYSMNWVRQAPGKGLEWVSYIRSSSSTIYYADSVKGRFTISRDNAKKSLYLQMNSLRDEDTAVYYCARRSIADYWGQGTLVTVSS

SEQ ID NO: 2310 - protein, 107 aa, synthetic construct
EIVLTQSPATLSSSPGERATLSCRASQSVTSYLNWYQQKPGQAPRLLIYDASNRATGIPARFSGSGSGTDFTLTISSLEPEDFALYYCQQRSNWPYTFGQGTKLEIK

SEQ ID NO: 2311 - DNA, 345 bp, synthetic construct
  source 1..345: mol_type = other DNA
gaggtgcagttggtggagtctgggggaggcttggtacagcctggggggtccctgagactctcctgtgcagcctctggattcaccttcagtagctatagcatgaactgggtccgccaggctccagggaaggggctggagtgggtttcatacattaggagtagtagtagtaccatatactacgcagactctgtgaagggccgattcaccatctccagagacaatgccaagaaatcattgtatctgcaaatgaatagtctgagagacgaggacacggctgtgtattactgtgcgagaaggagtatagctgactactggggccagggaaccctggtcaccgtctcctca

SEQ ID NO: 2312 - DNA, 321 bp, synthetic construct
  source 1..321: mol_type = other DNA
gaaattgtgttgacacagtctccagccaccctgtcttcgtctccaggggaaagagccaccctctcctgcagggccagtcagagtgttaccagctacttaaactggtaccaacagaaacctggccaggctcccaggctcctcatctatgatgcatccaacagggccactggcatcccagccaggttcagtggcagtgggtctgggacagacttcactctcaccatcagcagcctcgagcctgaagattttgcactttattactgtcagcagcgtagcaactggccgtacacttttggccaggggaccaaactggagatcaaa

SEQ ID NO: 2313 - protein, 8 aa, synthetic construct
GFTYSSYA

SEQ ID NO: 2314 - protein, 8 aa, synthetic construct
ISGSSSIT

SEQ ID NO: 2315 - protein, 11 aa, synthetic construct
AKGGRYGYFQH

SEQ ID NO: 2316 - protein, 25 aa, synthetic construct
EVQLLESGGGLVQPGGSLRLSCAAS

SEQ ID NO: 2317 - protein, 17 aa, synthetic construct
MSWVRRAPGKGLEWISI

SEQ ID NO: 2318 - protein, 38 aa, synthetic construct
YYADSMKGRFTISRDNSKNTLFLQMNSLRAEDTAVYYC

SEQ ID NO: 2319 - protein, 6 aa, synthetic construct
NIGSKS

SEQ ID NO: 2320 - skipped

SEQ ID NO: 2321 - protein, 11 aa, synthetic construct
QVWDSSSDPVV

SEQ ID NO: 2322 - protein, 25 aa, synthetic construct
SYVLTQPPSVSVAPGQTARITCGGN

SEQ ID NO: 2323 - protein, 17 aa, synthetic construct
VHWYQQKPGQAPVLVVY

SEQ ID NO: 2324 - protein, 36 aa, synthetic construct
DRPSGIPERFSGSNSGNTATLTISRVEAGDEADYYC

SEQ ID NO: 2325 - protein, 10 aa, synthetic construct
FGGGTMLTVL

SEQ ID NO: 2326 - protein, 118 aa, synthetic construct
EVQLLESGGGLVQPGGSLRLSCAASGFTYSSYAMSWVRRAPGKGLEWISIISGSSSITYYADSMKGRFTISRDNSKNTLFLQMNSLRAEDTAVYYCAKGGRYGYFQHWGQGTLVTVSS

SEQ ID NO: 2327 - protein, 108 aa, synthetic construct
SYVLTQPPSVSVAPGQTARITCGGNNIGSKSVHWYQQKPGQAPVLVVYDDSDRPSGIPERFSGSNSGNTATLTISRVEAGDEADYYCQVWDSSSDPVVFGGGTMLTVL

SEQ ID NO: 2328 - DNA, 354 bp, synthetic construct
  source 1..354: mol_type = other DNA
gaggtgcagctgttggagtctgggggaggcttggtacagccgggggggtccctgagactctcctgtgcagcctcgggattcacctatagcagctatgccatgagctgggtccgccgggctccagggaaggggctggagtggatctcaattattagtggtagtagtagtatcacatactacgcagactccatgaagggccggttcactatctctagagacaattccaagaacacgctttttctgcaaatgaatagcctgagagccgaggacacggccgtttattactgtgcgaagggggggaggtacgggtacttccaacactggggccagggcaccctggtcaccgtctcctca

SEQ ID NO: 2329 - DNA, 324 bp, synthetic construct
  source 1..324: mol_type = other DNA
tcctatgtgctgactcagccaccctcggtgtcagtggccccaggacagacggccaggattacctgtgggggaaacaacattggaagtaaaagtgtgcactggtaccagcagaagccaggccaggcccctgtgctggtcgtctatgatgatagcgaccggccctcagggatccctgagcgattctctggctccaactctgggaacacggccaccctgaccatcagcagggtcgaagccggggatgaggccgactattactgtcaggtgtgggatagtagtagtgatcctgtggtattcggcggagggaccatgctgaccgtccta

SEQ ID NO: 2330 - protein, 10 aa, synthetic construct
GFSLSTSEVG

SEQ ID NO: 2331 - protein, 7 aa, synthetic construct
IYWNDHK

SEQ ID NO: 2332 - protein, 11 aa, synthetic construct
ARRVTGEGFDP

SEQ ID NO: 2333 - protein, 25 aa, synthetic construct
QITLKESGPTLVKPTQTLTLTCTLS

SEQ ID NO: 2334 - protein, 17 aa, synthetic construct
VGWIRQPPGKALEWLAI

SEQ ID NO: 2335 - protein, 38 aa, synthetic construct
RYSPSLKNRLTFTKDTSKNQVVLTMTNMDPVDTATYYC

SEQ ID NO: 2336 - skipped

SEQ ID NO: 2337 - protein, 10 aa, synthetic construct
QSADSSGSYV

SEQ ID NO: 2338 - protein, 25 aa, synthetic construct
SYELTQPPSVSVSPGQTARITCSGD

SEQ ID NO: 2339 - protein, 17 aa, synthetic construct
AYWYQQKPGQAPVLVIF

SEQ ID NO: 2340 - protein, 10 aa, synthetic construct
FGTGTKVTVL

SEQ ID NO: 2341 - protein, 119 aa, synthetic construct
QITLKESGPTLVKPTQTLTLTCTLSGFSLSTSEVGVGWIRQPPGKALEWLAIIYWNDHKRYSPSLKNRLTFTKDTSKNQVVLTMTNMDPVDTATYYCARRVTGEGFDPWGQGTLVTVSS

SEQ ID NO: 2342 - protein, 107 aa, synthetic construct
SYELTQPPSVSVSPGQTARITCSGDALPKQYAYWYQQKPGQAPVLVIFKDTERPSGIPERFSGSSSGTTVTLTISGVQAEDEADYYCQSADSSGSYVFGTGTKVTVL

SEQ ID NO: 2343 - DNA, 357 bp, synthetic construct
  source 1..357: mol_type = other DNA
cagatcaccttaaaggagtctggtcctacgctggtgaaacccacacagaccctcacgctgacctgcaccctctctgggttctcactcagcactagtgaagtgggtgtgggctggatccgtcagcccccaggaaaggccctggagtggcttgcaatcatttattggaatgatcataagcgctacagcccatctctgaagaacaggctcaccttcaccaaggacacctccaaaaaccaggtggtccttacaatgaccaacatggaccctgtggacacagccacatattattgtgcacgcagagtaactggggaggggttcgacccctggggccagggaaccctggtcaccgtctcctca

SEQ ID NO: 2344 - DNA, 321 bp, synthetic construct
  source 1..321: mol_type = other DNA
tcctatgagctgacacagccaccctcggtgtcagtgtccccaggacagacggccaggatcacctgctctggagatgcattgccaaagcaatatgcttattggtaccagcagaagccaggccaggcccctgtgctggtgatatttaaagacactgagaggccctcagggatccctgagcgattctctggctccagctcagggacaacagtcacgttgaccatcagtggagtccaggcagaagatgaggctgactattactgtcaatcagcagacagcagtggttcttatgtcttcggaactgggaccaaggtcaccgtccta

SEQ ID NO: 2345 - protein, 8 aa, synthetic construct
GFTFSTYS

SEQ ID NO: 2346 - protein, 8 aa, synthetic construct
ISSGSSYI

SEQ ID NO: 2347 - protein, 8 aa, synthetic construct
TVTTHFHH

SEQ ID NO: 2348 - protein, 25 aa, synthetic construct
EVQLVESGGGLVKPGGSLRLSCAAS

SEQ ID NO: 2349 - protein, 17 aa, synthetic construct
MNWVRQAPGKGLEWVSS

SEQ ID NO: 2350 - protein, 38 aa, synthetic construct
YYADSVKGRFTISRDNAKNSLYLQMNSLRAEDTAVYYC

SEQ ID NO: 2351 - protein, 11 aa, synthetic construct
QSLVYSDGNTY

SEQ ID NO: 2352 - skipped

SEQ ID NO: 2353 - protein, 9 aa, synthetic construct
MQGTHWPLT

SEQ ID NO: 2354 - protein, 26 aa, synthetic construct
DVVMTQSPLSLPVTLGQPASISCRSS

SEQ ID NO: 2355 - protein, 17 aa, synthetic construct
LNWFQQRPGQSPRRLIY

SEQ ID NO: 2356 - protein, 36 aa, synthetic construct
NRDSGVPDRFSGSGSGTDFTLKISRVEAEDVGVYYC

SEQ ID NO: 2357 - protein, 115 aa, synthetic construct
EVQLVESGGGLVKPGGSLRLSCAASGFTFSTYSMNWVRQAPGKGLEWVSSISSGSSYIYYADSVKGRFTISRDNAKNSLYLQMNSLRAEDTAVYYCTVTTHFHHWGQGTLVTVSS

SEQ ID NO: 2358 - protein, 112 aa, synthetic construct
DVVMTQSPLSLPVTLGQPASISCRSSQSLVYSDGNTYLNWFQQRPGQSPRRLIYKVSNRDSGVPDRFSGSGSGTDFTLKISRVEAEDVGVYYCMQGTHWPLTFGQGTRLEIK

SEQ ID NO: 2359 - DNA, 345 bp, synthetic construct
  source 1..345: mol_type = other DNA
gaggtgcagctggtggagtctgggggaggcctggtcaagcctggggggtccctgagactctcctgtgcagcctctggattcaccttcagtacctatagcatgaactgggtccgccaggctccagggaaggggctggagtgggtctcatccattagtagtggtagtagttacatatactacgcagactcagtgaagggccgattcaccatctccagagacaacgccaagaactcactgtatctgcaaatgaacagcctgagagccgaggacacggctgtgtattactgtacagtaactacacacttccaccactggggccagggcaccctggtcaccgtctcctca

SEQ ID NO: 2360 - DNA, 336 bp, synthetic construct
  source 1..336: mol_type = other DNA
gatgttgtgatgactcagtctccactctccctgcccgtcacccttggacagccggcctccatctcctgcaggtctagtcaaagcctcgtatacagtgatggaaacacctacttgaattggtttcagcagaggccaggccaatctccaaggcgcctaatttataaggtttctaaccgggactctggggtcccagacagattcagcggcagtgggtcaggcactgatttcacactaaaaatcagcagggtggaggctgaggatgttggggtttattactgcatgcaaggtacacactggcctctcaccttcggccaagggacacgactggagattaaa

SEQ ID NO: 2361 - protein, 9 aa, synthetic construct
SGINVGAYR

SEQ ID NO: 2362 - protein, 7 aa, synthetic construct
YKSDSDK

SEQ ID NO: 2363 - protein, 9 aa, synthetic construct
MIWHSSAWV

SEQ ID NO: 2364 - protein, 25 aa, synthetic construct
QAVLTQPSSLSASPGASARLTCTLR

SEQ ID NO: 2365 - protein, 17 aa, synthetic construct
LYWYQQKPGSPPQYLLR

SEQ ID NO: 2366 - protein, 38 aa, synthetic construct
QQGSGVPSRFSGSKDASANAGILLISGLQSEDEADYYC

SEQ ID NO: 2367 - protein, 115 aa, synthetic construct; identical to SEQ ID NO: 2357

SEQ ID NO: 2368 - protein, 115 aa, synthetic construct
QAVLTQPSSLSASPGASARLTCTLRSGINVGAYRLYWYQQKPGSPPQYLLRYKSDSDKQQGSGVPSRFSGSKDASANAGILLISGLQSEDEADYYCMIWHSSAWVFGGGTKLTVL

SEQ ID NO: 2369 - DNA, 345 bp, synthetic construct; identical to SEQ ID NO: 2359
  source 1..345: mol_type = other DNA

SEQ ID NO: 2370 - DNA, 345 bp, synthetic construct
  source 1..345: mol_type = other DNA
caggctgtgctgactcagccgtcttccctctctgcatctcctggagcatcagccagactcacctgcaccttgcgcagtggcatcaatgttggtgcctacaggctatactggtaccagcagaagccaggaagtcctccccagtatctcctgaggtacaaatcagactcagataagcagcagggctctggagtccccagccgcttctctggatccaaagatgcttcggccaatgcagggattttactcatctctgggctccagtctgaggatgaggctgactattactgtatgatttggcacagcagcgcttgggtgttcggcggagggaccaagctgaccgtccta

SEQ ID NO: 2371 - protein, 8 aa, synthetic construct
GFTFSSYN

SEQ ID NO: 2372 - protein, 8 aa, synthetic construct
ISSSSNTI

SEQ ID NO: 2373 - protein, 7 aa, synthetic construct
ATLGRGY

SEQ ID NO: 2374 - protein, 38 aa, synthetic construct
YYADSVKGRFTVSRDNAKNSLYLQMNSLRDEDTAVYYC

SEQ ID NO: 2375 - protein, 11 aa, synthetic construct
WGQGTLVIASS

SEQ ID NO: 2376 - protein, 26 aa, synthetic construct
DVVMTQTPLSSPVTLGQPASISCRSS

SEQ ID NO: 2377 - protein, 114 aa, synthetic construct
EVQLVESGGGLVQPGGSLRLSCAASGFTFSSYNMNWVRQAPGKGLEWISYISSSSNTIYYADSVKGRFTVSRDNAKNSLYLQMNSLRDEDTAVYYCATLGRGYWGQGTLVIASS

SEQ ID NO: 2378 - protein, 112 aa, synthetic construct
DVVMTQTPLSSPVTLGQPASISCRSSQSLVHSDGNTYLSWLQQRPGQPPRLLIYKISNRFSGVPDRFSGSGAGTDFTLKISRVEAEDVGVYYCMQATQFPRTFGQGTKLEIK

SEQ ID NO: 2379 - DNA, 342 bp, synthetic construct
  source 1..342: mol_type = other DNA
gaggtgcaactggtggagtctgggggaggcttggtacagcctggggggtccctgagactctcctgtgcagcctctggattcaccttcagtagctataacatgaactgggttcgccaggctccagggaaggggctggagtggatttcatacattagtagtagtagtaataccatatactacgcagactctgtgaagggccgattcaccgtctccagggacaatgccaagaactcactgtatctgcaaatgaacagcctgagagacgaggacacggctgtgtattactgtgcgactctggggaggggctactggggccagggaaccctggtcatcgcctcctca

SEQ ID NO: 2380 - DNA, 336 bp, synthetic construct
  source 1..336: mol_type = other DNA
gatgttgtgatgacccagactccactctcctcacctgtcacccttggacagccggcctccatctcctgcaggtctagtcaaagcctcgtacacagtgatggaaacacctacttgagttggcttcagcagaggccaggccagcctccaagactcctaatttataagatttctaaccggttctctggggtcccagacagattcagtggcagtggggcagggacagatttcacactgaaaatcagcagggtggaagctgaggatgtcggggtttattactgcatgcaagctacacaatttcctcgcacttttggccaggggaccaagctggagatcaaa

SEQ ID NO: 2381 - protein, 8 aa, synthetic construct
GGSISSYY

SEQ ID NO: 2382 - protein, 7 aa, synthetic construct
IDTSGST

SEQ ID NO: 2383 - protein, 9 aa, synthetic construct
ARGGDGYRY

SEQ ID NO: 2384 - protein, 38 aa, synthetic construct
NYNPSLKSRVTMSIDTSKKQFSLKLSSVTAADTAVYYC

SEQ ID NO: 2385 - protein, 10 aa, synthetic construct
QSTDSSGSWV

SEQ ID NO: 2386 - protein, 17 aa, synthetic construct
ACWYQQKPGQAPVLVIY

SEQ ID NO: 2387 - protein, 36 aa, synthetic construct
ERPSGIPERFSGSSSGTTVTLTITGVQAEDEADYYC

SEQ ID NO: 2388 - protein, 115 aa, synthetic construct
QVQLQESGPGLVKPSETLSLTCTVSGGSISSYYWTWIRQPAGKGLEWIGRIDTSGSTNYNPSLKSRVTMSIDTSKKQFSLKLSSVTAADTAVYYCARGGDGYRYWGQGTLVTVSS

SEQ ID NO: 2389 - protein, 107 aa, synthetic construct
SYELTQPPSVSVSPGQTARITCSGDALPKQYACWYQQKPGQAPVLVIYKDSERPSGIPERFSGSSSGTTVTLTITGVQAEDEADYYCQSTDSSGSWVFGGGTKLTVL

SEQ ID NO: 2390 - DNA, 345 bp, synthetic construct
  source 1..345: mol_type = other DNA
caggtgcagctgcaggagtcgggcccaggactggtgaagccttcggagaccctgtccctcacctgcactgtctctggtggctccatcagtagttactactggacctggatccggcagcccgccgggaagggactggagtggattgggcgtatcgataccagtgggagcaccaactacaacccctccctcaagagtcgagtcaccatgtcaatagacacgtccaagaaacagttctccctgaagctgagctctgtgaccgccgcggacacggccgtgtattactgtgcgagagggggagatggctaccgctactggggccagggaaccctggtcaccgtctcctca

SEQ ID NO: 2391 - DNA, 321 bp, synthetic construct
  source 1..321: mol_type = other DNA
tcctatgagctgacacagccaccctcggtgtcagtgtccccaggacagacggccaggatcacctgctctggagatgcattgccaaagcaatatgcttgttggtaccagcagaagccaggccaggcccctgtgctggtgatatataaagacagtgagaggccctcagggatccctgagcgattctctggctccagctcagggacaacagtcacgttgaccatcactggagtccaggcagaagatgaggctgactattactgtcaatccacagacagcagtggttcttgggtgttcggcggagggaccaagctgaccgtccta

SEQ ID NO: 2392 - protein, 8 aa, synthetic construct
ISSSNSTI

SEQ ID NO: 2393 - protein, 8 aa, synthetic construct
ARRSLGDY

SEQ ID NO: 2394 - protein, 38 aa, synthetic construct
KYADSVKGRFTISRDNAKNSLYLQMNSLRDEDTAVYYC

SEQ ID NO: 2395 - protein, 11 aa, synthetic construct
WGQGTLVIVSS

SEQ ID NO: 2396 - protein, 6 aa, synthetic construct
QSVSSY

SEQ ID NO: 2397 - protein, 9 aa, synthetic construct
QQRRNWPYT

SEQ ID NO: 2398 - protein, 17 aa, synthetic construct
LAWYLQKPGQAPRLLIY

SEQ ID NO: 2399 - protein, 36 aa, synthetic construct
NRATGIPARFSGSGSGTDFTLTISRLEPEDFAVYYC

SEQ ID NO: 2400 - protein, 115 aa, synthetic construct
EVQLVESGGGLVQPGGSLRLSCAASGFTFSSYSMNWVRQAPGKGLEWISYISSSNSTIKYADSVKGRFTISRDNAKNSLYLQMNSLRDEDTAVYYCARRSLGDYWGQGTLVIVSS

SEQ ID NO: 2401 - protein, 107 aa, synthetic construct
EIVLTQSPATLSLSPGERATLSCRASQSVSSYLAWYLQKPGQAPRLLIYDVSNRATGIPARFSGSGSGTDFTLTISRLEPEDFAVYYCQQRRNWPYTFGQGTKLEIK

SEQ ID NO: 2402 - DNA, 345 bp, synthetic construct
  source 1..345: mol_type = other DNA
gaggtgcagctggtggagtctgggggaggcttggtacagcctggggggtccctgagactctcctgtgcagcctctggattcaccttcagtagctatagcatgaactgggtccgccaggctccagggaaggggctggagtggatttcatacattagtagtagtaatagtaccataaagtacgcagactctgtgaagggccgattcaccatctccagagacaatgccaagaactcactgtatctgcaaatgaacagcctgagagacgaggacacggctgtgtattactgtgcgagaaggagtctaggtgactactggggccagggaaccctggtcatcgtctcctca

SEQ ID NO: 2403 - DNA, 321 bp, synthetic construct
  source 1..321: mol_type = other DNA
gaaattgtgttgacacagtctccagccaccctgtctttgtctccaggggaaagagccaccctctcctgcagggccagtcagagtgttagcagctacttagcctggtacctacagaaacctggccaggctcccaggctcctcatctatgatgtgtccaacagggccactggcatcccagccaggttcagtggcagtgggtctgggacagacttcactctcaccatcagcagactagagcctgaagattttgcagtttattactgtcagcagcgtcgcaactggccgtacacttttggccaggggaccaagctggagatcaaa

SEQ ID NO: 2404 - protein, 6 aa, synthetic construct
QGISCS

SEQ ID NO: 2405 - skipped

SEQ ID NO: 2406 - protein, 9 aa, synthetic construct
QQFNSYPFT

SEQ ID NO: 2407 - protein, 26 aa, synthetic construct
DIQLTQSPSFLSASVGDRVTITCRAS

SEQ ID NO: 2408 - protein, 17 aa, synthetic construct
LAWYQQKPGKAPKLLIY

SEQ ID NO: 2409 - protein, 36 aa, synthetic construct
TLQSGVPSRFSGSGSGTEFTLTISSLQPEDFATYYC

SEQ ID NO: 2410 - protein, 10 aa, synthetic construct
FGPGTKVDIK

SEQ ID NO: 2411 - protein, 115 aa, synthetic construct; identical to SEQ ID NO: 2400

SEQ ID NO: 2412 - protein, 107 aa, synthetic construct
DIQLTQSPSFLSASVGDRVTITCRASQGISCSLAWYQQKPGKAPKLLIYAASTLQSGVPSRFSGSGSGTEFTLTISSLQPEDFATYYCQQFNSYPFTFGPGTKVDIK

SEQ ID NO: 2413 - DNA, 345 bp, synthetic construct; identical to SEQ ID NO: 2402
  source 1..345: mol_type = other DNA

SEQ ID NO: 2414 - DNA, 321 bp, synthetic construct
  source 1..321: mol_type = other DNA
gacatccagttgacccagtctccatccttcctgtctgcatctgtaggagacagagtcaccatcacttgccgggccagtcagggcattagctgttctttagcctggtatcagcaaaaaccagggaaagcccctaagctcctgatctatgctgcatccactttgcaaagtggggtcccatcaaggttcagcggcagtggatctgggacagaattcactctcacaatcagcagcctgcagcctgaagattttgcaacttattactgtcaacagtttaatagttacccattcactttcggccctgggaccaaagtggatatcaaa

SEQ ID NO: 2415 - protein, 8 aa, synthetic construct
GFTFSNAW

SEQ ID NO: 2416 - protein, 10 aa, synthetic construct
IKSKTDGGTT

SEQ ID NO: 2417 - protein, 8 aa, synthetic construct
VTDYPKDV

SEQ ID NO: 2418 - protein, 17 aa, synthetic construct
MSWVRQAPGKGLEWFGR

SEQ ID NO: 2419 - protein, 38 aa, synthetic construct
DYAAPVKGRFTISRDDSKNTLYLQMNSLKTEDTAVYYC

SEQ ID NO: 2420 - protein, 12 aa, synthetic construct
QSVLYSSKNKNY

SEQ ID NO: 2421 - skipped

SEQ ID NO: 2422 - protein, 9 aa, synthetic construct
QQYYSSPYT

SEQ ID NO: 2423 - protein, 26 aa, synthetic construct
DIVMTQSPDSLAVSLGERATINCKSS

SEQ ID NO: 2424 - protein, 17 aa, synthetic construct
LAWYQQKPGQPPKLLIY

SEQ ID NO: 2425 - protein, 36 aa, synthetic construct
TRESGVPDRFSGSGSGTDFTLAISSLQAEDVAVYYC

SEQ ID NO: 2426 - protein, 117 aa, synthetic construct
EVQLVESGGGLVKPGGSLRLSCAASGFTFSNAWMSWVRQAPGKGLEWFGRIKSKTDGGTTDYAAPVKGRFTISRDDSKNTLYLQMNSLKTEDTAVYYCVTDYPKDVWGQGTTVTVSS

SEQ ID NO: 2427 - protein, 113 aa, synthetic construct
DIVMTQSPDSLAVSLGERATINCKSSQSVLYSSKNKNYLAWYQQKPGQPPKLLIYWASTRESGVPDRFSGSGSGTDFTLAISSLQAEDVAVYYCQQYYSSPYTFGQGTKLEIK

SEQ ID NO: 2428 - DNA, 351 bp, synthetic construct
  source 1..351: mol_type = other DNA
gaggtgcagctggtggagtctgggggaggcttggtaaagcctggggggtcccttagactctcctgtgcagcctctggattcactttcagtaacgcctggatgagctgggtccgccaggctccagggaaggggctggagtggtttggccgtattaaaagcaaaactgatggtgggacaacagactacgctgcacccgtgaaaggcagattcaccatctcaagagatgactcaaaaaacacgctgtatctgcaaatgaacagcctgaaaaccgaggacacagccgtgtattactgtgtcacagattacccgaaggacgtctggggccaagggaccacggtcaccgtctcctca

SEQ ID NO: 2429 - DNA, 339 bp, synthetic construct
  source 1..339: mol_type = other DNA
gacatcgtgatgacccagtctccagactccctggctgtgtctctgggcgagagggccaccatcaactgcaagtccagccagagtgttttatacagctccaaaaataagaactacttagcttggtaccagcagaaaccaggacagcctcctaagctgctcatttactgggcatctacccgggaatccggggtccctgaccgattcagtggcagcgggtctgggacagatttcactctcgccatcagcagcctgcaggctgaagatgtggcagtttattactgtcagcaatattatagtagtccgtacacttttggccaggggaccaagctggagatcaaa

SEQ ID NO: 2430 - protein, 8 aa, synthetic construct
GFTFNNYD

SEQ ID NO: 2431 - protein, 7 aa, synthetic construct
IGAAGDT

SEQ ID NO: 2432 - protein, 20 aa, synthetic construct
ARAGETLEGATIGYYYGMDV

SEQ ID NO: 2433 - protein, 17 aa, synthetic construct
MHWVRQAAGKGLEWVST

SEQ ID NO: 2434 - protein, 38 aa, synthetic construct
YYPGSVKGRFIISRENAKNSLYLQMNSLRAGDTAVYYC

SEQ ID NO: 2435 - protein, 11 aa, synthetic construct
QSLLHSNGYNY

SEQ ID NO: 2436 - skipped

SEQ ID NO: 2437 - protein, 9 aa, synthetic construct
MQALQIPLT

SEQ ID NO: 2438 - protein, 26 aa, synthetic construct
DILMTQSPLSLPVTPGEPASISCRSS

SEQ ID NO: 2439 - protein, 17 aa, synthetic construct
LDWYLQKPGQSPQLLIY

SEQ ID NO: 2440 - protein, 36 aa, synthetic construct
NRASGVPDRFSGSGSGTDFTLKFSRVEAEDVGLYYC

SEQ ID NO: 2441 - protein, 126 aa, synthetic construct
EVQLVESGGGLVQPGGSLRLSCAASGFTFNNYDMHWVRQAAGKGLEWVSTIGAAGDTYYPGSVKGRFIISRENAKNSLYLQMNSLRAGDTAVYYCARAGETLEGATIGYYYGMDVWGQGTTVTVSS

SEQ ID NO: 2442 - protein, 112 aa, synthetic construct
DILMTQSPLSLPVTPGEPASISCRSSQSLLHSNGYNYLDWYLQKPGQSPQLLIYLGSNRASGVPDRFSGSGSGTDFTLKFSRVEAEDVGLYYCMQALQIPLTFGGGTKVEIK

SEQ ID NO: 2443 - DNA, 378 bp, synthetic construct
  source 1..378: mol_type = other DNA
gaggtgcagctggtggagtctgggggaggcttggtacagcctggggggtccctgagactctcctgtgcagcctctggattcaccttcaataactacgacatgcactgggtccgccaagctgcaggaaaaggtctggagtgggtctcaactattggtgctgctggtgacacatattatccaggctccgtgaagggccgattcatcatctccagagaaaatgccaagaactccttgtatcttcaaatgaacagcctgagagccggggacacggctgtgtattactgtgcaagagccggagagaccttagagggagctactatcggctactactacggtatggacgtctggggccaggggaccacggtcaccgtctcctca

SEQ ID NO: 2444 - DNA, 336 bp, synthetic construct
  source 1..336: mol_type = other DNA
gatattctgatgactcagtctccactctccctgcccgtcacccctggagagccggcctccatctcctgcaggtctagtcagagcctcctgcatagtaatggatacaactatttggattggtacctgcagaagccagggcagtctccacagctcctgatctatttgggttctaatcgggcctccggggtccctgacaggttcagtggcagtggatcaggcacagattttacactgaaattcagcagagtggaggctgaggatgttggactttattactgcatgcaagctctacaaattccgctcactttcggcggagggaccaaggtggagatcaaa

SEQ ID NO: 2445 - protein, 8 aa, synthetic construct
GYTFTGYY

SEQ ID NO: 2446 - protein, 8 aa, synthetic construct
INPNSGGT

SEQ ID NO: 2447 - protein, 7 aa, synthetic construct
AGDAFDI

SEQ ID NO: 2448 - protein, 25 aa, synthetic construct [sequence omitted]

SEQ ID NO: 2449 - protein, 17 aa, synthetic construct
MHWVRQAPGQGLEWMGW

SEQ ID NO: 2450 - protein, 38 aa, synthetic construct
NYAQKFQGRVTMTRDTSISTAYMELSRLRSDDTAVYYC

SEQ ID NO: 2451 - protein, 11 aa, synthetic construct
WGQGTMVTVSS

SEQ ID NO: 2452 - protein, 12 aa, synthetic construct
QSVLYSSNNKNY

SEQ ID NO: 2453 - protein, 9 aa, synthetic construct
QQYYSTPLT

SEQ ID NO: 2454 - protein, 36 aa, synthetic construct
TRESGVPDRFSGSGSGTDFTLTISSLQAEDVAVYYC

SEQ ID NO: 2455 - protein, 114 aa, synthetic construct
QVQLVQSGAEVKKPGASVKVSCKASGYTFTGYYMHWVRQAPGQGLEWMGWINPNSGGTNYAQKFQGRVTMTRDTSISTAYMELSRLRSDDTAVYYCAGDAFDIWGQGTMVTVSS

SEQ ID NO: 2456 - protein, 113 aa, synthetic construct
DIVMTQSPDSLAVSLGERATINCKSSQSVLYSSNNKNYLAWYQQKPGQPPKLLIYWASTRESGVPDRFSGSGSGTDFTLTISSLQAEDVAVYYCQQYYSTPLTFGGGTKVEIK

SEQ ID NO: 2457 - DNA, 342 bp, synthetic construct
  source 1..342: mol_type = other DNA
caggtgcagctggtgcagtctggggctgaggtgaagaagcctggggcctcagtgaaggtctcctgcaaggcttctggatacaccttcaccggctactatatgcactgggtgcgacaggcccctggacaagggcttgagtggatgggatggatcaaccctaacagtggtggcacaaactatgcacagaagtttcagggcagggtcaccatgaccagggacacgtccatcagcacagcctacatggagctgagcaggctgagatctgacgacacggccgtgtattactgtgctggggatgcttttgatatctggggccaagggacaatggtcaccgtctcttca

SEQ ID NO: 2458 - DNA, 339 bp, synthetic construct
  source 1..339: mol_type = other DNA
gacatcgtgatgacccagtctccagactccctggctgtgtctctgggcgagagggccaccatcaactgcaagtccagccagagtgttttatacagctccaacaataagaactacttagcttggtaccagcagaaaccaggacagcctcctaagctgctcatttactgggcatctacccgggaatccggggtccctgaccgattcagtggcagcgggtctgggacagatttcactctcaccatcagcagcctgcaggctgaagatgtggcagtttattactgtcagcaatattatagtactccgctcactttcggcggagggaccaaggtggagatcaaa

SEQ ID NO: 2459 - protein, 10 aa, synthetic construct
GFSLINARMA

SEQ ID NO: 2460 - protein, 7 aa, synthetic construct
IFSNDEK

SEQ ID NO: 2461 - protein, 14 aa, synthetic construct
ARIRGYSYNYGMDV

SEQ ID NO: 2462 - protein, 25 aa, synthetic construct
QVTLKESGPVLVKPTETLTLTCTVS

SEQ ID NO: 2463 - protein, 17 aa, synthetic construct
VSWIRQPPGKALEWLAH

SEQ ID NO: 2464 - protein, 38 aa, synthetic construct
SYSTSLKSRLTISKDTSKSQVVLIMTNMDPVDTATYYC

SEQ ID NO: 2465 - protein, 11 aa, synthetic construct
QSLLHSNGYIY

SEQ ID NO: 2466 - skipped

SEQ ID NO: 2467 - protein, 9 aa, synthetic construct
MQTLQIPRT

SEQ ID NO: 2468 - protein, 26 aa, synthetic construct
DIVMTQSPLSLPVIPGEPASISCRSS

SEQ ID NO: 2469 - protein, 36 aa, synthetic construct
NRASGVPDRFSGSGSGTDFKLKISRVEAEDVGVYYC

SEQ ID NO: 2470 - protein, 122 aa, synthetic construct
QVTLKESGPVLVKPTETLTLTCTVSGFSLINARMAVSWIRQPPGKALEWLAHIFSNDEKSYSTSLKSRLTISKDTSKSQVVLIMTNMDPVDTATYYCARIRGYSYNYGMDVWGQGTTVTVSS

SEQ ID NO: 2471 - protein, 112 aa, synthetic construct
DIVMTQSPLSLPVIPGEPASISCRSSQSLLHSNGYIYLDWYLQKPGQSPQLLIYVGSNRASGVPDRFSGSGSGTDFKLKISRVEAEDVGVYYCMQTLQIPRTFGGGTKVEIK

SEQ ID NO: 2472 - DNA, 366 bp, synthetic construct
  source 1..366: mol_type = other DNA
caggtcaccttgaaggagtctggtcctgtgctggtgaaacccacagagaccctcacgctgacctgcaccgtctctgggttctcactcatcaatgctagaatggctgtgagctggatccgtcagcccccagggaaggccctggagtggcttgcacacattttttcgaatgacgaaaaatcctacagcacatctctgaagagcagactcaccatctccaaggacacctccaaaagccaggtggtccttatcatgaccaacatggaccctgtggacacagccacatattactgtgcacggatccgtggatacagctataactacggtatggacgtctggggccaagggaccacggtcaccgtctcctca

SEQ ID NO: 2473 - DNA, 336 bp, synthetic construct
  source 1..336: mol_type = other DNA
gatattgtgatgactcagtctccactctccctgcccgtcatccctggagagccggcctccatctcctgcaggtctagtcagagcctcctgcatagtaatggatacatctatttggattggtacctgcagaagccagggcagtctccacagctcctgatctatgtgggttctaatcgggcctccggggtccctgacaggttcagtggcagtggatcaggcacagatttcaaactgaaaatcagcagagtggaggctgaggatgttggggtttattactgcatgcaaactctacaaattccgcgcactttcggcggagggaccaaggtggagatcaaa

SEQ ID NO: 2474 - protein, 324 aa, synthetic construct
AKTTPPSVYPLAPGSAAQTNSMVTLGCLVKGYFPEPVTVTWNSGSLSSGVHTFPAVLQSDLYTLSSSVTVPSSPRPSETVTCNVAHPASSTKVDKKIVPRDCGCKPCICTVPEVSSVFIFPPKPKDVLTITLTPKVTCVVVDISKDDPEVQFSWFVDDVEVHTAQTQPREEQFNSTFRSVSELPIMHQDWLNGKEFKCRVNSAAFPAPIEKTISKTKGRPKAPQVYTIPPPKEQMAKDKVSLTCMITDFFPEDITVEWQWNGQPAENYKNTQPIMNTNGSYFVYSKLNVQKSNWEAGNTFTCSVLHEGLHNHHTEKSLSHSPGK

SEQ ID NO: 2475 - protein, 393 aa, synthetic construct
AKTTPPSVYPLAPGSAAQTNSMVTLGCLVKGYFPEPVTVTWNSGSLSSGVHTFPAVLQSDLYTLSSSVTVPSSPRPSETVTCNVAHPASSTKVDKKIVPRDCGCKPCICTVPEVSSVFIFPPKPKDVLTITLTPKVTCVVVDISKDDPEVQFSWFVDDVEVHTAQTQPREEQFNSTFRSVSELPIMHQDWLNGKEFKCRVNSAAFPAPIEKTISKTKGRPKAPQVYTIPPPKEQMAKDKVSLTCMITDFFPEDITVEWQWNGQPAENYKNTQPIMNTNGSYFVYSKLNVQKSNWEAGNTFTCSVLHEGLHNHHTEKSLSHSPGLQLDETCAEAQDGELDGLWTTITIFISLFLLSVCYSAAVTLFKVKWIFSSVVELKQTLVPEYKNMIGQAP

SEQ ID NO: 2476 - protein, 330 aa, synthetic construct
AKTTAPSVYPLAPVCGDTTGSSVTLGCLVKGYFPEPVTLTWNSGSLSSGVHTFPAVLQSDLYTLSSSVTVTSSTWPSQSITCNVAHPASSTKVDKKIEPRGPTIKPCPPCKCPAPNLLGGPSVFIFPPKIKDVLMISLSPIVTCVVVDVSEDDPDVQISWFVNNVEVHTAQTQTHREDYNSTLRVVSALPIQHQDWMSGKEFKCKVNNKDLPAPIERTISKPKGSVRAPQVYVLPPPEEEMTKKQVTLTCMVTDFMPEDIYVEWTNNGKTELNYKNTEPVLDSDGSYFMYSKLRVEKKNWVERNSYSCSVVHEGLHNHHTTKSFSRTPGK

SEQ ID NO: 2477 - DNA, 990 bp, synthetic construct
  source 1..990: mol_type = other DNA
gctaaaacaacagccccatcggtctatccactggcccctgtgtgtggagatacaactggctcctcggtgactctaggatgcctggtcaagggttatttccctgagccagtgaccttgacctggaactctggatccctgtccagtggtgtgcacaccttcccagctgtcctgcagtctgacctctacaccctcagcagctcagtgactgtaacctcgagcacctggcccagccagtccatcacctgcaatgtggcccacccggcaagcagcaccaaggtggacaagaaaattgagcccagagggcccacaatcaagccctgtcctccatgcaaatgcccagcacctaacctcttgggtggaccatccgtcttcatcttccctccaaagatcaaggatgtactcatgatctccctgagccccatagtcacatgtgtggtggtggatgtgagcgaggatgacccagatgtccagatcagctggtttgtgaacaacgtggaagtacacacagctcagacacaaacccatagagaggattacaacagtactctccgggtggtcagtgccctccccatccagcaccaggactggatgagtggcaaggagttcaaatgcaaggtcaacaacaaagacctcccagcgcccatcgagagaaccatctcaaaacccaaagggtcagtaagagctccacaggtatatgtcttgcctccaccagaagaagagatgactaagaaacaggtcactctgacctgcatggtcacagacttcatgcctgaagacatttacgtggagtggaccaacaacgggaaaacagagctaaactacaagaacactgaaccagtcctggactctgatggttcttacttcatgtacagcaagctgagagtggaaaagaagaactgggtggaaagaaatagctactcctgttcagtggtccacgagggtctgcacaatcaccacacgactaagagcttctcccggactccgggtaaa

SEQ ID NO: 2478 - protein, 335 aa, synthetic construct
AKTTAPSVYPLVPVCGGTTGSSVTLGCLVKGYFPEPVTLTWNSGSLSSGVHTFPALLQSGLYTLSSSVTVTSNTWPSQTITCNVAHPASSTKVDKKIEPRVPITQNPCPPHQRVPPCAAPDLLGGPSVFIFPPKIKDVLMISLSPMVTCVVVDVSEDDPDVQISWFVNNVEVHTAQTQTHREDYNSTLRVVSALPIQHQDWMSGKEFKCKVNNRALPSPIEKTISKPRGPVRAPQVYVLPPPAEEMTKKEFSLTCMITGFLPAEIAVDWTSNGRTEQNYKNTATVLDSDGSYFMYSKLRVQKSTWERGSLFACSVVHEVLHNHLTTKTISRSLGK

SEQ ID NO: 2479 - protein, 404 aa, synthetic construct
KTTPPSVYPLAPGCGDTTGSSVTLGCLVKGYFPESVTVTWNSGSLSSSVHTFPALLQSGLYTMSSSVTVPSSTWPSQTVTCSVAHPASSTTVDKKLEPSGPISTINPCPPCKECHKCPAPNLEGGPSVFIFPPNIKDVLMISLTPKVTCVVVDVSEDDPDVQISWFVNNVEVHTAQTQTHREDYNSTIRVVSTLPIQHQDWMSGKEFKCKVNNKDLPSPIERTISKIKGLVRAPQVYILPPPAEQLSRKDVSLTCLVVGFNPGDISVEWTSNGHTEENYKDTAPVLDSDGSYFIYSKLNMKTSKWEKTDSFSCNVRHEGLKNYYLKKTISRSPGLDLDDICAEAKDGELDGLWTTITIFISLFLLSVCYSASVTLFKVKWIFSSVVELKQKISPDYRNMIGQGA

SEQ ID NO: 2480 - protein, 403 aa, synthetic construct
KTTAPSVYPLAPVCGGTTGSSVTLGCLVKGYFPEPVTLTWNSGSLSSGVHTFPALLQSGLYTLSSSVTVTSNTWPSQTITCNVAHPASSTKVDKKIEPRVPITQNPCPPLKECPPCAAPDLLGGPSVFIFPPKIKDVLMISLSPMVTCVVVDVSEDDPDVQISWFVNNVEVHTAQTQTHREDYNSTLRVVSALPIQHQDWMSGKEFKCKVNNRALPSPIEKTISKPRGPVRAPQVYVLPPPAEEMTKKEFSLTCMITGFLPAEIAVDWTSNGRTEQNYKNTATVLDSDGSYFMYSKLRVQKSTWERGSLFACSVVHEGLHNHLTTKTISRSLGLDLDDVCTEAQDGELDGLWTTITIFISLFLLSVCYSASVTLFKVKWIFSSVVELKQKISPDYRNMIGQGA

SEQ ID NO: 2481 - protein, 398 aa, synthetic construct
TTTAPSVYPLVPGCSDTSGSSVTLGCLVKGYFPEPVTVKWNYGALSSGVRTVSSVLQSGFYSLSSLVTVPSSTWPSQTVICNVAHPASKTELIKRIEPRIPKPSTPPGSSCPPGNILGGPSVFIFPPKPKDALMISLTPKVTCVVVDVSEDDPDVHVSWFVDNKEVHTAWTQPREAQYNSTFRVVSALPIQHQDWMRGKEFKCKVNNKALPAPIERTISKPKGRAQTPQVYTIPPPREQMSKKKVSLTCLVTNFFSEAISVEWERNGELEQDYKNTPPILDSDGTYFLYSKLTVDTDSWLQGEIFTCSVVHEALHNHHTQKNLSRSPELELNETCAEAQDGELDGLWTTITIFISLFLLSVCYSASVTLFKVKWIFSSVVQVKQTAIPDYRNMIGQGA

SEQ ID NO: 2482 - protein, 106 aa, synthetic construct
ADAAPTVSIFPPSSEQLTSGGASVVCFLNNFYPKDINVKWKIDGSERQNGVLNSWTDQDSKDSTYSMSSTLTLTKDEYERHNSYTCEATHKTSTSPIVKSFNRNEC

SEQ ID NO: 2483 - DNA, 318 bp, synthetic construct
  source 1..318: mol_type = other DNA
gcagatgctgcaccaactgtatccatcttcccaccatccagtgagcagttaacatctggaggtgcctcagtcgtgtgcttcttgaacaacttctaccccaaagacatcaatgtcaagtggaagattgatggcagtgaacgacaaaatggcgtcctgaacagttggactgatcaggacagcaaagacagcacctacagcatgagcagcaccctcacgttgaccaaggacgagtatgaacgacataacagctatacctgtgaggccactcacaagacatcaacttcacccattgtcaagagcttcaacaggaatgagtgt

SEQ ID NO: 2484 - protein, 105 aa, synthetic construct
QPKSSPSVTLFPPSSEELETNKATLVCTITDFYPGVVTVDWKVDGTPVTQGMETTQPSKQSNNKYMASSYLTLTARAWERHSSYSCQVTHEGHTVEKSLSRADCS

SEQ ID NO: 2485 - protein, 104 aa, synthetic construct
QPKSTPTLTVFPPSSEELKENKATLVCLISNFSPSGVTVAWKANGTPITQGVDTSNPTKEGNKFMASSFLHLTSDQWRSHNSFTCQVTHEGDTVEKSLSPAECL

SEQ ID NO: 2486 - protein, 104 aa, synthetic construct
QPKSTPTLTMFPPSPEELQENKATLVCLISNFSPSGVTVAWKANGTPITQGVDTSNPTKEDNKYMASSFLHLTSDQWRSHNSFTCQVTHEGDTVEKSLSPAECL

SEQ ID NO: 2487 - protein, 329 aa, synthetic construct
ASTKGPSVFPLAPSSKSTSGGTAALGCLVKDYFPEPVTVSWNSGALTSGVHTFPAVLQSSGLYSLSSVVTVPSSSLGTQTYICNVNHKPSNTKVDKRVEPKSCDKTHTCPPCPAPELLGGPSVFLFPPKPKDTLMISRTPEVTCVVVDVSHEDPEVKFNWYVDGVEVHNAKTKPREEQYNSTYRVVSVLTVLHQDWLNGKEYKCKVSNKALPAPIEKTISKAKGQPREPQVYTLPPSREEMTKNQVSLTCLVKGFYPSDIAVEWESNGQPENNYKTTPPVLDSDGSFFLYSKLTVDKSRWQQGNVFSCSVMHEALHNHYTQKSLSLSPG

SEQ ID NO: 2488 - DNA, 987 bp, synthetic construct
  source 1..987: mol_type = other DNA
gccagcacaaaagggcccagtgtgttcccgctcgcaccaagcagcaaatcaacgtcaggcggcacagccgcgttgggttgccttgtaaaagactacttcccagaaccagttacggtgtcatggaacagtggtgcactcacgagcggcgttcataccttccccgccgtacttcagagttcaggtctttactcactttccagcgtggtcacagtaccgtcaagctctcttggaacacagacatatatctgtaacgtaaatcataagcctagcaataccaaagtcgataaacgagtggaacccaagagttgtgataaaacccacacctgtcccccttgcccggcaccggaactgctgggtggtccatcagtattcttgtttccgcctaagccaaaggacacactgatgatatccagaactccagaggttacgtgcgtagtcgtggacgtcagtcatgaagaccccgaagttaagttcaactggtacgtggatggtgtggaagtacataatgcgaagacgaaacccagggaagaacaatataactcaacttatagggtagtcagcgtcttgactgtacttcaccaagattggttgaatggcaaagagtacaaatgcaaggtaagcaacaaagcattgcctgcgccaatcgaaaagactatctcaaaagcaaagggccagccacgcgaaccacaagtgtatacattgccgcccagtcgggaagaaatgacgaaaaatcaagtcagtctcacatgcctcgtgaaaggattttatccctctgacatagctgtggagtgggaaagtaatggccaacccgaaaataattacaaaacgacgcctcccgttttggactcagatgggagttttttcctttacagtaagctgacggttgacaaaagcaggtggcaacaagggaacgtcttttcttgtagtgtgatgcatgaggcgctccacaatcattacactcaaaaatccttgagcctgtctccaggc

SEQ ID NO: 2489 - protein, 326 aa, synthetic construct
ASTKGPSVFPLAPCSRSTSESTAALGCLVKDYFPEPVTVSWNSGALTSGVHTFPAVLQSSGLYSLSSVVTVPSSNFGTQTYTCNVDHKPSNTKVDKTVERKCCVECPPCPAPPVAGPSVFLFPPKPKDTLMISRTPEVTCVVVDVSHEDPEVQFNWYVDGVEVHNAKTKPREEQFNSTFRVVSVLTVVHQDWLNGKEYKCKVSNKGLPAPIEKTISKTKGQPREPQVYTLPPSREEMTKNQVSLTCLVKGFYPSDISVEWESNGQPENNYKTTPPMLDSDGSFFLYSKLTVDKSRWQQGNVFSCSVMHEALHNHYTQKSLSLSPGK

SEQ ID NO: 2490 - protein, 377 aa, synthetic construct
ASTKGPSVFPLAPCSRSTSGGTAALGCLVKDYFPEPVTVSWNSGALTSGVHTFPAVLQSSGLYSLSSVVTVPSSSLGTQTYTCNVNHKPSNTKVDKRVELKTPLGDTTHTCPRCPEPKSCDTPPPCPRCPEPKSCDTPPPCPRCPEPKSCDTPPPCPRCPAPELLGGPSVFLFPPKPKDTLMISRTPEVTCVVVDVSHEDPEVQFKWYVDGVEVHNAKTKPREEQYNSTFRVVSVLTVLHQDWLNGKEYKCKVSNKALPAPIEKTISKTKGQPREPQVYTLPPSREEMTKNQVSLTCLVKGFYPSDIAVEWESSGQPENNYNTTPPMLDSDGSFFLYSKLTVDKSRWQQGNIFSCSVMHEALHNRFTQKSLSLSPGK

SEQ ID NO: 2491 - protein, 327 aa, synthetic construct
ASTKGPSVFPLAPCSRSTSESTAALGCLVKDYFPEPVTVSWNSGALTSGVHTFPAVLQSSGLYSLSSVVTVPSSSLGTKTYTCNVDHKPSNTKVDKRVESKYGPPCPSCPAPEFLGGPSVFLFPPKPKDTLMISRTPEVTCVVVDVSQEDPEVQFNWYVDGVEVHNAKTKPREEQFNSTYRVVSVLTVLHQDWLNGKEYKCKVSNKGLPSSIEKTISKAKGQPREPQVYTLPPSQEEMTKNQVSLTCLVKGFYPSDIAVEWESNGQPENNYKTTPPVLDSDGSFFLYSRLTVDKSRWQEGNVFSCSVMHEALHNHYTQKSLSLSLGK

SEQ ID NO: 2492 - protein, 106 aa, synthetic construct
GQPKANPTVTLFPPSSEELQANKATLVCLISDFYPGAVTVAWKADGSPVKAGVETTKPSKQSNNKYAASSYLSLTPEQWKSHRSYSCQVTHEGSTVEKTVAPTECS

SEQ ID NO: 2493 - protein, 106 aa, synthetic construct
GQPKAAPSVTLFPPSSEELQANKATLVCLISDFYPGAVTVAWKADSSPVKAGVETTTPSKQSNNKYAASSYLSLTPEQWKSHRSYSCQVTHEGSTVEKTVAPTECS

SEQ ID NO: 2494 - protein, 106 aa, synthetic construct
GQPKAAPSVTLFPPSSEELQANKATLVCLISDFYPGAVTVAWKADSSPVKAGVETTTPSKQSNNKYAASSYLSLTPEQWKSHKSYSCQVTHEGSTVEKTVAPTECS

SEQ ID NO: 2495 - protein, 106 aa, synthetic construct
GQPKAAPSVTLFPPSSEELQANKATLVCLISDFYPGAVKVAWKADGSPVNTGVETTTPSKQSNNKYAASSYLSLTPEQWKSHRSYSCQVTHEGSTVEKTVAPAECS

SEQ ID NO: 2496 - protein, 106 aa, synthetic construct
GQPKAAPSVTLFPPSSEELQANKATLVCLVSDFNPGAVTVAWKADGSPVKVGVETTKPSKQSNNKYAASSYLSLTPEQWKSHRSYSCRVTHEGSTVEKTVAPAECS

SEQ ID NO: 2497 - protein, 106 aa, synthetic construct
TVAAPSVFIFPPSDEQLKSGTASVVCLLNNFYPREAKVQWKVDNALQSGNSQESVTEQDSKDSTYSLSSTLTLSKADYEKHKVYACEVTHQGLSSPVTKSFNRGEC

SEQ ID NO: 2498 - DNA, 318 bp, synthetic construct
  source 1..318: mol_type = other DNA
actgtcgcagcaccttctgtcttcatctttccgccaagcgatgaacagttgaaatctggaacagcgtccgtggtgtgcctgctcaacaacttctatcctcgggaagcgaaggtgcaatggaaggtagataatgctcttcagagtggcaattcccaagagtcagttacggagcaagatagcaaggacagcacgtattccctgtctagtacgttgactctttccaaggctgactatgaaaagcacaaggtgtatgcctgtgaagtaacccaccaaggtctctcaagtcctgtaactaagagctttaatcgaggagaatgc

SEQ ID NO: 2499-3622 - skipped (1124 entries)

SEQ ID NO: 3623 - DNA, 2232 bp, synthetic construct
  source 1..2232: mol_type = other DNA
atggctgccgatggttatcttccagattggctcgaggacaaccttagtgaaggaattcgcgagtggtgggctttgaaacctggagcccctcaacccaaggcaaatcaacaacatcaagacaacgctcgaggtcttgtgcttccgggttacaaataccttggacccggcaacggactcgacaagggggagccggtcaacgcagcagacgcggcggccctcgagcacgacaaggcctacgaccagcagctcaaggccggagacaacccgtacctcaagtacaaccacgccgacgccgagttccaggagcggctcaaagaagatacgtcttttgggggcaacctcgggcgagcagtcttccaggccaaaaagaggcttcttgaacctcttggtctggttgaggaagcggctaagacggctcctggaaagaagaggcctgtagagcagtctcctcaggaaccggactcctccgcgggtattggcaaatcgggtgcacagcccgctaaaaagagactcaatttcggtcagactggcgacacagagtcagtcccagaccctcaaccaatcggagaacctcccgcagccccctcaggtgtgggatctcttacaatggcttcaggtggtggcgcaccagtggcagacaataacgaaggtgccgatggagtgggtagttcctcgggaaattggcattgcgattcccaatggctgggggacagagtcatcaccaccagcacccgaacctgggccctgcccacctacaacaatcacctctacaagcaaatctccaacagcacatctggaggatcttcaaatgacaacgcctacttcggctacagcaccccctgggggtattttgacttcaacagattccactgccacttctcaccacgtgactggcagcgactcatcaacaacaactggggattccggcctaagcgactcaacttcaagctcttcaacattcaggtcaaagaggttacggacaacaatggagtcaagaccatcgccaataaccttaccagcacggtccaggtcttcacggactcagactatcagctcccgtacgtgctcgggtcggctcacgagggctgcctcccgccgttcccagcggacgttttcatgattcctcagtacgggtatctgacgcttaatgatggaagccaggccgtgggtcgttcgtccttttactgcctggaatatttcccgtcgcaaatgctaagaacgggtaacaacttccagttcagctacgagtttgagaacgtacctttccatagcagctacgctcacagccaaagcctggaccgactaatgaatccactcatcgaccaatacttgtactatctctcaaagactattaacggttctggacagaatcaacaaacgctaaaattcagtgtggccggacccagcaacatggctgtccagggaagaaactacatacctggacccagctaccgacaacaacgtgtctcaaccactgtgactcaaaacaacaacagcgaatttgcttggcctggagcttcttcttgggctctcaatggacgtaatagcttgatgaatcctggacctgctatggccagccacaaagaaggagaggaccgtttctttcctttgtctggatctttaatttttggcaaacaaggaactggaagagacaacgtggatgcggacaaagtcatgataaccaacgaagaagaaattaaaactactaacccggtagcaacggagtcctatggacaagtggccacaaaccaccagagtccgcttaatggtgccgtccatctttatgctcaggcgcagaccggctgggttcaaaaccaaggaatacttccgggtatggtttggcaggacagagatgtgtacctgcaaggacccatttgggccaaaattcctcacacggacggcaactttcacccttctccgctgatgggagggtttggaatgaagcacccgcctcctcagatcctcatcaaaaacacacctgtacctgccgatcctccaacggccttcaacaaggacaagctgaactctttcatcacccagtattctactggccaagtcagcgtggagatcgagtgggagctgcagaaggaaaacagcaagcggtggaacccggagatccagtacacttccaactattacaagtctaataatgttgaatttgctgttaatactgaaggtgtatatagtgaaccccgccccattggcaccagatacctgactcgtaatctgtaa

SEQ ID NO: 3624 - DNA, 2232 bp, synthetic construct
  source 1..2232: mol_type = other DNA
atggctgccgatggttatcttccagattggctcgaggacaaccttagtgaaggaattcgcgagtggtgggctttgaaacctggagcccctcaacccaaggcaaatcaacaacatcaagacaacgctcgaggtcttgtgcttccgggttacaaataccttggacccggcaacggactcgacaagggggagccggtcaacgcagcagacgcggcggccctcgagcacgacaaggcctacgaccagcagctcaaggccggagacaacccgtacctcaagtacaaccacgccgacgccgagttccaggagcggctcaaagaagatacgtcttttgggggcaacctcgggcgagcagtcttccaggccaaaaagaggcttcttgaacctcttggtctggttgaggaagcggctaagacggctcctggaaagaagaggcctgtagagcagtctcctcaggaaccggactcctccgcgggtattggcaaatcgggtgcacagcccgctaaaaagagactcaatttcggtcagactggcgacacagagtcagtcccagaccctcaaccaatcggagaacctcccgcagccccctcaggtgtgggatctcttacaatggcttcaggtggtggcgcaccagtggcagacaataacgaaggtgccgatggagtgggtagttcctcgggaaattggcattgcgattcccaatggctgggggacagagtcatcaccaccagcacccgaacctgggccctgcccacctacaacaatcacctctacaagcaaatctccaacagcacatctggaggatcttcaaatgacaacgcctacttcggctacagcaccccctgggggtattttgacttcaacagattccactgccacttctcaccacgtgactggcagcgactcatcaacaacaactggggattccggcctaagcgactcaacttcaagctcttcaacattcaggtcaaagaggttacggacaacaatggagtcaagaccatcgccaataaccttaccagcacggtccaggtcttcacggactcagactatcagctcccgtacgtgctcgggtcggctcacgagggctgcctcccgccgttcccagcggacgttttcatgattcctcagtacgggtatctgacgcttaatgatggaagccaggccgtgggtcgttcgtccttttactgcctggaatatttcccgtcgcaaatgctaagaacgggtaacaacttccagttcagctacgagtttgagaacgtacctttccatagcagctacgctcacagccaaagcctggaccgactaatgaatccactcatcgaccaatacttgtactatctctcaaagactattaacggttctggacagaatcaacaaacgctaaaattcagtgtggccggacccagcaacatggctgtccagggaagaaactacatacctggacccagctaccgacaacaacgtgtctcaaccactgtgactcaaaacaacaacagcgaatttgcttggcctggagcttcttcttgggctctcaatggacgtaatagcttgatgaatcctggacctgctatggccagccacaaagaaggagaggaccgtttctttcctttgtctggatctttaatttttggcaaacaaggaactggaagagacaacgtggatgcggacaaagtcatgataaccaacgaagaagaaattaaaactactaacccggtagcaacggagtcctatggacaagtggccacaaaccaccagagtgcacaggctcgtgattctccgaagggttggcaggcgcagaccggctgggttcaaaaccaaggaatacttccgggtatggtttggcaggacagagatgtgtacctgcaaggacccatttgggccaaaattcctcacacggacggcaactttcacccttctccgctgatgggagggtttggaatgaagcacccgcctcctcagatcctcatcaaaaacacacctgtacctgccgatcctccaacggccttcaacaaggacaagctgaactctttcatcacccagtattctactggccaagtcagcgtggagatcgagtgggagctgcagaaggaaaacagcaagcggtggaacccggagatccagtacacttccaactattacaagtctaataatgttgaatttgctgttaatactgaaggtgtatatagtgaaccccgccccattggcaccagatacctgactcgtaatctgtaa

SEQ ID NO: 3625 - DNA, 2232 bp, synthetic construct
  source 1..2232: mol_type = other DNA
atggctgccgatggttatcttccagattggctcgaggacaaccttagtgaaggaattcgcgagtggtgggctttgaaacctggagcccctcaacccaaggcaaatcaacaacatcaagacaacgctcgaggtcttgtgcttccgggttacaaataccttggacccggcaacggactcgacaagggggagccggtcaacgcagcagacgcggcggccctcgagcacgacaaggcctacgaccagcagctcaaggccggagacaacccgtacctcaagtacaaccacgccgacgccgagttccaggagcggctcaaagaagatacgtcttttgggggcaacctcgggcgagcagtcttccaggccaaaaagaggcttcttgaacctcttggtctggttgaggaagcggctaagacggctcctggaaagaagaggcctgtagagcagtctcctcaggaaccggactcctccgcgggtattggcaaatcgggtgcacagcccgctaaaaagagactcaatttcggtcagactggcgacacagagtcagtcccagaccctcaaccaatcggagaacctcccgcagccccctcaggtgtgggatctcttacaatggcttcaggtggtggcgcaccagtggcagacaataacgaaggtgccgatggagtgggtagttcctcgggaaattggcattgcgattcccaatggctgggggacagagtcatcaccaccagcacccgaacctgggccctgcccacctacaacaatcacctctacaagcaaatctccaacagcacatctggaggatcttcaaatgacaacgcctacttcggctacagcaccccctgggggtattttgacttcaacagattccactgccacttctcaccacgtgactggcagcgactcatcaacaacaactggggattccggcctaagcgactcaacttcaagctcttcaacattcaggtcaaagaggttacggacaacaatggagtcaagaccatcgccaataaccttaccagcacggtccaggtcttcacggactcagactatcagctcccgtacgtgctcgggtcggctcacgagggctgcctcccgccgttcccagcggacgttttcatgattcctcagtacgggtatctgacgcttaatgatggaagccaggccgtgggtcgttcgtccttttactgcctggaatatttcccgtcgcaaatgctaagaacgggtaacaacttccagttcagctacgagtttgagaacgtacctttccatagcagctacgctcacagccaaagcctggaccgactaatgaatccactcatcgaccaatacttgtactatctctcaaagactattaacggttctggacagaatcaacaaacgctaaaattcagtgtggccggacccagcaacatggctgtccagggaagaaactacatacctggacccagctaccgacaacaacgtgtctcaaccactgtgactcaaaacaacaacagcgaatttgcttggcctggagcttcttcttgggctctcaatggacgtaatagcttgatgaatcctggacctgctatggccagccacaaagaaggagaggaccgtttctttcctttgtctggatctttaatttttggcaaacaaggaactggaagagacaacgtggatgcggacaaagtcatgataaccaacgaagaagaaattaaaactactaacccggtagcaacggagtcctatggacaagtggccacaaaccaccagagtgcacaggctcgtgattctccgaagggttggcaggcgcagaccggctgggttcaaaaccaaggaatacttccgggtatggtttggcaggacagagatgtgtacctgcaaggacccatttgggccaaaattcctcacacggacggcaactttcacccttctccgctgatgggagggtttggaatgaagcacccgcctcctcagatcctcatcaaaaacacacctgtacctgcggatcctccaacggccttcaacaaggacaagctgaactctttcatcacccagtattctactggccaagtcagcgtggagatcgagtgggagctgcagaaggaaaacagcaagcgctggaacccggagatccagtacacttccaactattacaagtctaataatgttgaatttgctgttaatactgaaggtgtatatagtgaaccccgccccattggcaccagatacctgactcgtaatctgtaa

SEQ ID NO: 3626 - DNA, 2232 bp, synthetic construct
  source 1..2232: mol_type = other DNA
atggctgccgatggttatcttccagattggctcgaggacaaccttagtgaaggaattcgcgagtggtgggctttgaaacctggagcccctcaacccaaggcaaatcaacaacatcaagacaacgctcgaggtcttgtgcttccgggttacaaataccttggacccggcaacggactcgacaagggggagccggtcaacgcagcagacgcggcggccctcgagcacgacaaggcctacgaccagcagctcaaggccggagacaacccgtacctcaagtacaaccacgccgacgccgagttccaggagcggctcaaagaagatacgtcttttgggggcaacctcgggcgagcagtcttccaggccaaaaagaggcttcttgaacctcttggtctggttgaggaagcggctaagacggctcctggaaagaagaggcctgtagagcagtctcctcaggaaccggactcctccgcgggtattggcaaatcgggtgcacagcccgctaaaaagagactcaatttcggtcagactggcgacacagagtcagtcccagaccctcaaccaatcggagaacctcccgcagccccctcaggtgtgggatctcttacaatggcttcaggtggtggcgcaccagtggcagacaataacgaaggtgccgatggagtgggtagttcctcgggaaattggcattgcgattcccaatggctgggggacagagtcatcaccaccagcacccgaacctgggccctgcccacctacaacaatcacctctacaagcaaatctccaacagcacatctggaggatcttcaaatgacaacgcctacttcggctacagcaccccctgggggtattttgacttcaacagattccactgccacttctcaccacgtgactggcagcgactcatcaacaacaactggggattccggcctaagcgactcaacttcaagctcttcaacattcaggtcaaagaggttacggacaacaatggagtcaagaccatcgccaataaccttaccagcacggtccaggtcttcacggactcagactatcagctcccgtacgtgctcgggtcggctcacgagggctgcctcccgccgttcccagcggacgttttcatgattcctcagtacgggtatctgacgcttaatgatggaagccaggccgtgggtcgttcgtccttttactgcctggaatatttcccgtcgcaaatgctaagaacgggtaacaacttccagttcagctacgagtttgagaacgtacctttccatagcagctacgctcacagccaaagcctggaccgactaatgaatccactcatcgaccaatacttgtactatctctcaaagactattaacggttctggacagaatcaacaaacgctaaaattcagtgtggccggacccagcaacatggctgtccagggaagaaactacatacctggacccagctaccgacaacaacgtgtctcaaccactgtgactcaaaacaacaacagcgaatttgcttggcctggagcttcttcttgggctctcaatggacgtaatagcttgatgaatcctggacctgctatggccagccacaaagaaggagaggaccgtttctttcctttgtctggatctttaatttttggcaaacaaggaactggaagagacaacgtggatgcggacaaagtcatgataaccaacgaagaagaaattaaaactactaacccggtagcaacggagtcctatggacaagtggccacaaaccaccagagtgcacaggcttattctacggatgtgaggatgcaggcgcagaccggctgggttcaaaaccaaggaatacttccgggtatggtttggcaggacagagatgtgtacctgcaaggacccatttgggccaaaattcctcacacggacggcaactttcacccttctccgctgatgggagggtttggaatgaagcacccgcctcctcagatcctcatcaaaaacacacctgtacctgccgatcctccaacggccttcaacaaggacaagctgaactctttcatcacccagtattctactggccaagtcagcgtggagatcgagtgggagctgcagaaggaaaacagcaagcggtggaacccggagatccagtacacttccaactattacaagtctaataatgttgaatttgctgttaatactgaaggtgtatatagtgaaccccgccccattggcaccagatacctgactcgtaatctgtaa

SEQ ID NO: 3627 - DNA, 2232 bp, synthetic construct
  source 1..2232: mol_type = other DNA
atggctgccgatggttatcttccagattggctcgaggacaaccttagtgaaggaattcgcgagtggtgggctttgaaacctggagcccctcaacccaaggcaaatcaacaacatcaagacaacgctcgaggtcttgtgcttccgggttacaaataccttggacccggcaacggactcgacaagggggagccggtcaacgcagcagacgcggcggccctcgagcacgacaaggcctacgaccagcagctcaaggccggagacaacccgtacctcaagtacaaccacgccgacgccgagttccaggagcggctcaaagaagatacgtcttttgggggcaacctcgggcgagcagtcttccaggccaaaaagaggcttcttgaacctcttggtctggttgaggaagcggctaagacggctcctggaaagaagaggcctgtagagcagtctcctcaggaaccggactcctccgcgggtattggcaaatcgggtgcacagcccgctaaaaagagactcaatttcggtcagactggcgacacagagtcagtcccagaccctcaaccaatcggagaacctcccgcagccccctcaggtgtgggatctcttacaatggcttcaggtggtggcgcaccagtggcagacaataacgaaggtgccgatggagtgggtagttcctcgggaaattggcattgcgattcccaatggctgggggacagagtcatcaccaccagcacccgaacctgggccctgcccacctacaacaatcacctctacaagcaaatctccaacagcacatctggaggatcttcaaatgacaacgcctacttcggctacagcaccccctgggggtattttgacttcaacagattccactgccacttctcaccacgtgactggcagcgactcatcaacaacaactggggattccggcctaagcgactcaacttcaagctcttcaacattcaggtcaaagaggttacggacaacaatggagtcaagaccatcgccaataaccttaccagcacggtccaggtcttcacggactcagactatcagctcccgtacgtgctcgggtcggctcacgagggctgcctcccgccgttcccagcggacgttttcatgattcctcagtacgggtatctgacgcttaatgatggaagccaggccgtgggtcgttcgtccttttactgcctggaatatttcccgtcgcaaatgctaagaacgggtaacaacttccagttcagctacgagtttgagaacgtacctttccatagcagctacgctcacagccaaagcctggaccgactaatgaatccactcatcgaccaatacttgtactatctctcaaagactattaacggttctggacagaatcaacaaacgctaaaattcagtgtggccggacccagcaacatggctgtccagggaagaaactacatacctggacccagctaccgacaacaacgtgtctcaaccactgtgactcaaaacaacaacagcgaatttgcttggcctggagcttcttcttgggctctcaatggacgtaatagcttgatgaatcctggacctgctatggccagccacaaagaaggagaggaccgtttctttcctttgtctggatctttaatttttggcaaacaaggaactggaagagacaacgtggatgcggacaaagtcatgataaccaacgaagaagaaattaaaactactaacccggtagcaacggagtcctatggacaagtggccacaaaccaccagagtgcacagattgttatgaattcgttgaaggctcaggcgcagaccggctgggttcaaaaccaaggaatacttccgggtatggtttggcaggacagagatgtgtacctgcaaggacccatttgggccaaaattcctcacacggacggcaactttcacccttctccgctgatgggagggtttggaatgaagcacccgcctcctcagatcctcatcaaaaacacacctgtacctgccgatcctccaacggccttcaacaaggacaagctgaactctttcatcacccagtattctactggccaagtcagcgtggagatcgagtgggagctgcagaaggaaaacagcaagcggtggaacccggagatccagtacacttccaactattacaagtctaataatgttgaatttgctgttaatactgaaggtgtatatagtgaaccccgccccattggcaccagatacctgactcgtaatctgtaa

SEQ ID NO: 3628 - DNA, 2232 bp, synthetic construct
  source 1..2232: mol_type = other DNA
atggctgccgatggttatcttccagattggctcgaggacaaccttagtgaaggaattcgcgagtggtgggctttgaaacctggagcccctcaacccaaggcaaatcaacaacatcaagacaacgctcgaggtcttgtgcttccgggttacaaataccttggacccggcaacggactcgacaagggggagccggtcaacgcagcagacgcggcggccctcgagcacgacaaggcctacgaccagcagctcaaggccggagacaacccgtacctcaagtacaaccacgccgacgccgagttccaggagcggctcaaagaagatacgtcttttgggggcaacctcgggcgagcagtcttccaggccaaaaagaggcttcttgaacctcttggtctggttgaggaagcggctaagacggctcctggaaagaagaggcctgtagagcagtctcctcaggaaccggactcctccgcgggtattggcaaatcgggtgcacagcccgctaaaaagagactcaatttcggtcagactggcgacacagagtcagtcccagaccctcaaccaatcggagaacctcccgcagccccctcaggtgtgggatctcttacaatggcttcaggtggtggcgcaccagtggcagacaataacgaaggtgccgatggagtgggtagttcctcgggaaattggcattgcgattcccaatggctgggggacagagtcatcaccaccagcacccgaacctgggccctgcccacctacaacaatcacctctacaagcaaatctccaacagcacatctggaggatcttcaaatgacaacgcctacttcggctacagcaccccctgggggtattttgacttcaacagattccactgccacttctcaccacgtgactggcagcgactcatcaacaacaactggggattccggcctaagcgactcaacttcaagctcttcaacattcaggtcaaagaggttacggacaacaatggagtcaagaccatcgccaataaccttaccagcacggtccaggtcttcacggactcagactatcagctcccgtacgtgctcgggtcggctcacgagggctgcctcccgccgttcccagcggacgttttcatgattcctcagtacgggtatctgacgcttaatgatggaagccaggccgtgggtcgttcgtccttttactgcctggaatatttcccgtcgcaaatgctaagaacgggtaacaacttccagttcagctacgagtttgagaacgtacctttccatagcagctacgctcacagccaaagcctggaccgactaatgaatccactcatcgaccaatacttgtactatctctcaaagactattaacggttctggacagaatcaacaaacgctaaaattcagtgtggccggacccagcaacatggctgtccagggaagaaactacatacctggacccagctaccgacaacaacgtgtctcaaccactgtgactcaaaacaacaacagcgaatttgcttggcctggagcttcttcttgggctctcaatggacgtaatagcttgatgaatcctggacctgctatggccagccacaaagaaggagaggaccgtttctttcctttgtctggatctttaatttttggcaaacaaggaactggaagagacaacgtggatgcggacaaagtcatgataaccaacgaagaagaaattaaaactactaacccggtagcaacggagtcctatggacaagtggccacaaaccaccagagtgcacaggctcgggagagtcctcgtgggctgcaggcgcagaccggctgggttcaaaaccaaggaatacttccgggtatggtttggcaggacagagatgtgtacctgcaaggacccatttgggccaaaattcctcacacggacggcaactttcacccttctccgctgatgggagggtttggaatgaagcacccgcctcctcagatcctcatcaaaaacacacctgtacctgccgatcctccaacggccttcaacaaggacaagctgaactctttcatcacccagtattctactggccaagtcagcgtggagatcgagtgggagctgcagaaggaaaacagcaagcggtggaacccggagatccagtacacttccaactattacaagtctaataatgttgaatttgctgttaatactgaaggtgtatatagtgaaccccgccccattggcaccagatacctgactcgtaatctgtaa

SEQ ID NO: 3629 - DNA, 2232 bp, synthetic construct
  source 1..2232: mol_type = other DNA
atggctgccgatggttatcttccagattggctcgaggacaaccttagtgaaggaattcgcgagtggtgggctttgaaacctggagcccctcaacccaaggcaaatcaacaacatcaagacaacgctcgaggtcttgtgcttccgggttacaaataccttggacccggcaacggactcgacaagggggagccggtcaacgcagcagacgcggcggccctcgagcacgacaaggcctacgaccagcagctcaaggccggagacaacccgtacctcaagtacaaccacgccgacgccgagttccaggagcggctcaaagaagatacgtcttttgggggcaacctcgggcgagcagtcttccaggccaaaaagaggcttcttgaacctcttggtctggttgaggaagcggctaagacggctcctggaaagaagaggcctgtagagcagtctcctcaggaaccggactcctccgcgggtattggcaaatcgggtgcacagcccgctaaaaagagactcaatttcggtcagactggcgacacagagtcagtcccagaccctcaaccaatcggagaacctcccgcagccccctcaggtgtgggatctcttacaatggcttcaggtggtggcgcaccagtggcagacaataacgaaggtgccgatggagtgggtagttcctcgggaaattggcattgcgattcccaatggctgggggacagagtcatcaccaccagcacccgaacctgggccctgcccacctacaacaatcacctctacaagcaaatctccaacagcacatctggaggatcttcaaatgacaacgcctacttcggctacagcaccccctgggggtattttgacttcaacagattccactgccacttctcaccacgtgactggcagcgactcatcaacaacaactggggattccggcctaagcgactcaacttcaagctcttcaacattcaggtcaaagaggttacggacaacaatggagtcaagaccatcgccaataaccttaccagcacggtccaggtcttcacggactcagactatcagctcccgtacgtgctcgggtcggctcacgagggctgcctcccgccgttcccagcggacgttttcatgattcctcagtacgggtatctgacgcttaatgatggaagccaggccgtgggtcgttcgtccttttactgcctggaatatttcccgtcgcaaatgctaagaacgggtaacaacttccagttcagctacgagtttgagaacgtacctttccatagcagctacgctcacagccaaagcctggaccgactaatgaatccactcatcgaccaatacttgtactatctctcaaagactattaacggttctggacagaatcaacaaacgctaaaattcagtgtggccggacccagcaacatggctgtccagggaagaaactacatacctggacccagctaccgacaacaacgtgtctcaaccactgtgactcaaaacaacaacagcgaatttgcttggcctggagcttcttcttgggctctcaatggacgtaatagcttgatgaatcctggacctgctatggccagccacaaagaaggagaggaccgtttctttcctttgtctggatctttaatttttggcaaacaaggaactggaagagacaacgtggatgcggacaaagtcatgataaccaacgaagaagaaattaaaactactaacccggtagcaacggagtcctatggacaagtggccacaaaccaccagagtgcacaggctagttttaatgatactagggctcaggcgcagaccggctgggttcaaaaccaaggaatacttccgggtatggtttggcaggacagagatgtgtacctgcaaggacccatttgggccaaaattcctcacacggacggcaactttcacccttctccgctgatgggagggtttggaatgaagcacccgcctcctcagatcctcatcaaaaacacacctgtacctgccgatcctccaacggccttcaacaaggacaagctgaactctttcatcacccagtattctactggccaagtcagcgtggagatcgagtgggagctgcagaaggaaaacagcaagcggtggaacccggagatccagtacacttccaactattacaagtctaataatgttgaatttgctgttaatactgaaggtgtatatagtgaaccccgccccattggcaccagatacctgactcgtaatctgtaa

SEQ ID NO: 3630 - DNA, 2232 bp, synthetic construct
  source 1..2232: mol_type = other DNA
atggctgccgatggttatcttccagattggctcgaggacaaccttagtgaaggaattcgcgagtggtgggctttgaaacctggagcccctcaacccaaggcaaatcaacaacatcaagacaacgctcgaggtcttgtgcttccgggttacaaataccttggacccggcaacggactcgacaagggggagccggtcaacgcagcagacgcggcggccctcgagcacgacaaggcctacgaccagcagctcaaggccggagacaacccgtacctcaagtacaaccacgccgacgccgagttccaggagcggctcaaagaagatacgtcttttgggggcaacctcgggcgagcagtcttccaggccaaaaagaggcttcttgaacctcttggtctggttgaggaagcggctaagacggctcctggaaagaagaggcctgtagagcagtctcctcaggaaccggactcctccgcgggtattggcaaatcgggtgcacagcccgctaaaaagagactcaatttcggtcagactggcgacacagagtcagtcccagaccctcaaccaatcggagaacctcccgcagccccctcaggtgtgggatctcttacaatggcttcaggtggtggcgcaccagtggcagacaataacgaaggtgccgatggagtgggtagttcctcgggaaattggcattgcgattcccaatggctgggggacagagtcatcaccaccagcacccgaacctgggccctgcccacctacaacaatcacctctacaagcaaatctccaacagcacatctggaggatcttcaaatgacaacgcctacttcggctacagcaccccctgggggtattttgacttcaacagattccactgccacttctcaccacgtgactggcagcgactcatcaacaacaactggggattccggcctaagcgactcaacttcaagctcttcaacattcaggtcaaagaggttacggacaacaatggagtcaagaccatcgccaataaccttaccagcacggtccaggtcttcacggactcagactatcagctcccgtacgtgctcgggtcggctcacgagggctgcctcccgccgttcccagcggacgttttcatgattcctcagtacgggtatctgacgcttaatgatggaagccaggccgtgggtcgttcgtccttttactgcctggaatatttcccgtcgcaaatgctaagaacgggtaacaacttccagttcagctacgagtttgagaacgtacctttccatagcagctacgctcacagccaaagcctggaccgactaatgaatccactcatcgaccaatacttgtactatctctcaaagactattaacggttctggacagaatcaacaaacgctaaaattcagtgtggccggacccagcaacatggctgtccagggaagaaactacatacctggacccagctaccgacaacaacgtgtctcaaccactgtgactcaaaacaacaacagcgaatttgcttggcctggagcttcttcttgggctctcaatggacgtaatagcttgatgaatcctggacctgctatggccagccacaaagaaggagaggaccgtttctttcctttgtctggatctttaatttttggcaaacaaggaactggaagagacaacgtggatgcggacaaagtcatgataaccaacgaagaagaaattaaaactactaacccggtagcaacggagtcctatggacaagtggccacaaaccaccagagtggtggtacgttggccgtcgtgtcgcttgctcaggcgcagaccggctgggttcaaaaccaaggaatacttccgggtatggtttggcaggacagagatgtgtacctgcaaggacccatttgggccaaaattcctcacacggacggcaactttcacccttctccgctgatgggagggtttggaatgaagcacccgcctcctcagatcctcatcaaaaacacacctgtacctgccgatcctccaacggccttcaacaaggacaagctgaactctttcatcacccagtattctactggccaagtcagcgtggagatcgagtgggagctgcagaaggaaaacagcaagcggtggaacccggagatccagtacacttccaactattacaagtctaataatgttgaatttgctgttaatactgaaggtgtatatagtgaaccccgccccattggcaccagatacctgactcgtaatctgtaa

SEQ ID NO: 3631 - DNA, 2232 bp, synthetic construct
  source 1..2232: mol_type = other DNA
atggctgccgatggttatcttccagattggctcgaggacaaccttagtgaaggaattcgcgagtggtgggctttgaaacctggagcccctcaacccaaggcaaatcaacaacatcaagacaacgctcgaggtcttgtgcttccgggttacaaataccttggacccggcaacggactcgacaagggggagccggtcaacgcagcagacgcggcggccctcgagcacgacaaggcctacgaccagcagctcaaggccggagacaacccgtacctcaagtacaaccacgccgacgccgagttccaggagcggctcaaagaagatacgtcttttgggggcaacctcgggcgagcagtcttccaggccaaaaagaggcttcttgaacctcttggtctggttgaggaagcggctaagacggctcctggaaagaagaggcctgtagagcagtctcctcaggaaccggactcctccgcgggtattggcaaatcgggtgcacagcccgctaaaaagagactcaatttcggtcagactggcgacacagagtcagtcccagaccctcaaccaatcggagaacctcccgcagccccctcaggtgtgggatctcttacaatggcttcaggtggtggcgcaccagtggcagacaataacgaaggtgccgatggagtgggtagttcctcgggaaattggcattgcgattcccaatggctgggggacagagtcatcaccaccagcacccgaacctgggccctgcccacctacaacaatcacctctacaagcaaatctccaacagcacatctggaggatcttcaaatgacaacgcctacttcggctacagcaccccctgggggtattttgacttcaacagattccactgccacttctcaccacgtgactggcagcgactcatcaacaacaactggggattccggcctaagcgactcaacttcaagctcttcaacattcaggtcaaagaggttacggacaacaatggagtcaagaccatcgccaataaccttaccagcacggtccaggtcttcacggactcagactatcagctcccgtacgtgctcgggtcggctcacgagggctgcctcccgccgttcccagcggacgttttcatgattcctcagtacgggtatctgacgcttaatgatggaagccaggccgtgggtcgttcgtccttttactgcctggaatatttcccgtcgcaaatgctaagaacgggtaacaacttccagttcagctacgagtttgagaacgtacctttccatagcagctacgctcacagccaaagcctggaccgactaatgaatccactcatcgaccaatacttgtactatctctcaaagactattaacggttctggacagaatcaacaaacgctaaaattcagtgtggccggacccagcaacatggctgtccagggaagaaactacatacctggacccagctaccgacaacaacgtgtctcaaccactgtgactcaaaacaacaacagcgaatttgcttggcctggagcttcttcttgggctctcaatggacgtaatagcttgatgaatcctggacctgctatggccagccacaaagaaggagaggaccgtttctttcctttgtctggatctttaatttttggcaaacaaggaactggaagagacaacgtggatgcggacaaagtcatgataaccaacgaagaagaaattaaaactactaacccggtagcaacggagtcctatggacaagtggccacaaaccaccagagtgcacaggcttatgggttgccgaagggtcctcaggcgcagaccggctgggttcaaaaccaaggaatacttccgggtatggtttggcaggacagagatgtgtacctgcaaggacccatttgggccaaaattcctcacacggacggcaactttcacccttctccgctgatgggagggtttggaatgaagcacccgcctcctcagatcctcatcaaaaacacacctgtacctgccgatcctccaacggccttcaacaaggacaagctgaactctttcatcacccagtattctactggccaagtcagcgtggagatcgagtgggagctgcagaaggaaaacagcaagcggtggaacccggagatccagtacacttccaactattacaagtctaataatgttgaatttgctgttaatactgaaggtgtatatagtgaaccccgccccattggcaccagatacctgactcgtaatctgtaa

SEQ ID NO: 3632 - DNA, 2232 bp, synthetic construct
  source 1..2232: mol_type = other DNA
atggctgccgatggttatcttccagattggctcgaggacaaccttagtgaaggaattcgcgagtggtgggctttgaaacctggagcccctcaacccaaggcaaatcaacaacatcaagacaacgctcgaggtcttgtgcttccgggttacaaataccttggacccggcaacggactcgacaagggggagccggtcaacgcagcagacgcggcggccctcgagcacgacaaggcctacgaccagcagctcaaggccggagacaacccgtacctcaagtacaaccacgccgacgccgagttccaggagcggctcaaagaagatacgtcttttgggggcaacctcgggcgagcagtcttccaggccaaaaagaggcttcttgaacctcttggtctggttgaggaagcggctaagacggctcctggaaagaagaggcctgtagagcagtctcctcaggaaccggactcctccgcgggtattggcaaatcgggtgcacagcccgctaaaaagagactcaatttcggtcagactggcgacacagagtcagtcccagaccctcaaccaatcggagaacctcccgcagccccctcaggtgtgggatctcttacaatggcttcaggtggtggcgcaccagtggcagacaataacgaaggtgccgatggagtgggtagttcctcgggaaattggcattgcgattcccaatggctgggggacagagtcatcaccaccagcacccgaacctgggccctgcccacctacaacaatcacctctacaagcaaatctccaacagcacatctggaggatcttcaaatgacaacgcctacttcggctacagcaccccctgggggtattttgacttcaacagattccactgccacttctcaccacgtgactggcagcgactcatcaacaacaactggggattccggcctaagcgactcaacttcaagctcttcaacattcaggtcaaagaggttacggacaacaatggagtcaagaccatcgccaataaccttaccagcacggtccaggtcttcacggactcagactatcagctcccgtacgtgctcgggtcggctcacgagggctgcctcccgccgttcccagcggacgttttcatgattcctcagtacgggtatctgacgcttaatgatggaagccaggccgtgggtcgttcgtccttttactgcctggaatatttcccgtcgcaaatgctaagaacgggtaacaacttccagttcagctacgagtttgagaacgtacctttccatagcagctacgctcacagccaaagcctggaccgactaatgaatccactcatcgaccaatacttgtactatctctcaaagactattaacggttctggacagaatcaacaaacgctaaaattcagtgtggccggacccagcaacatggctgtccagggaagaaactacatacctggacccagctaccgacaacaacgtgtctcaaccactgtgactcaaaacaacaacagcgaatttgcttggcctggagcttcttcttgggctctcaatggacgtaatagcttgatgaatcctggacctgctatggccagccacaaagaaggagaggaccgtttctttcctttgtctggatctttaatttttggcaaacaaggaactggaagagacaacgtggatgcggacaaagtcatgataaccaacgaagaagaaattaaaactactaacccggtagcaacggagtcctatggacaagtggccacaaaccaccagagtgcacaggcttcgactgggacgcttcggcttcaggcgcagaccggctgggttcaaaaccaaggaatacttccgggtatggtttggcaggacagagatgtgtacctgcaaggacccatttgggccaaaattcctcacacggacggcaactttcacccttctccgctgatgggagggtttggaatgaagcacccgcctcctcagatcctcatcaaaaacacacctgtacctgccgatcctccaacggccttcaacaaggacaagctgaactctttcatcacccagtattctactggccaagtcagcgtggagatcgagtgggagctgcagaaggaaaacagcaagcggtggaacccggagatccagtacacttccaactattacaagtctaataatgttgaatttgctgttaatactgaaggtgtatatagtgaaccccgccccattggcaccagatacctgactcgtaatctgtaa

SEQ ID NO: 3633 - DNA, 2232 bp, synthetic construct
  source 1..2232: mol_type = other DNA
atggctgccgatggttatcttccagattggctcgaggacaaccttagtgaaggaattcgcgagtggtgggctttgaaacctggagcccctcaacccaaggcaaatcaacaacatcaagacaacgctcgaggtcttgtgcttccgggttacaaataccttggacccggcaacggactcgacaagggggagccggtcaacgcagcagacgcggcggccctcgagcacgacaaggcctacgaccagcagctcaaggccggagacaacccgtacctcaagtacaaccacgccgacgccgagttccaggagcggctcaaagaagatacgtcttttgggggcaacctcgggcgagcagtcttccaggccaaaaagaggcttcttgaacctcttggtctggttgaggaagcggctaagacggctcctggaaagaagaggcctgtagagcagtctcctcaggaaccggactcctccgcgggtattggcaaatcgggtgcacagcccgctaaaaagagactcaatttcggtcagactggcgacacagagtcagtcccagaccctcaaccaatcggagaacctcccgcagccccctcaggtgtgggatctcttacaatggcttcaggtggtggcgcaccagtggcagacaataacgaaggtgccgatggagtgggtagttcctcgggaaattggcattgcgattcccaatggctgggggacagagtcatcaccaccagcacccgaacctgggccctgcccacctacaacaatcacctctacaagcaaatctccaacagcacatctggaggatcttcaaatgacaacgcctacttcggctacagcaccccctgggggtattttgacttcaacagattccactgccacttctcaccacgtgactggcagcgactcatcaacaacaactggggattccggcctaagcgactcaacttcaagctcttcaacattcaggtcaaagaggttacggacaacaatggagtcaagaccatcgccaataaccttaccagcacggtccaggtcttcacggactcagactatcagctcccgtacgtgctcgggtcggctcacgagggctgcctcccgccgttcccagcggacgttttcatgattcctcagtacgggtatctgacgcttaatgatggaagccaggccgtgggtcgttcgtccttttactgcctggaatatttcccgtcgcaaatgctaagaacgggtaacaacttccagttcagctacgagtttgagaacgtacctttccatagcagctacgctcacagccaaagcctggaccgactaatgaatccactcatcgaccaatacttgtactatctctcaaagactattaacggttctggacagaatcaacaaacgctaaaattcagtgtggccggacccagcaacatggctgtccagggaagaaactacatacctggacccagctaccgacaacaacgtgtctcaaccactgtgactcaaaacaacaacagcgaatttgcttggcctggagcttcttcttgggctctcaatggacgtaatagcttgatgaatcctggacctgctatggccagccacaaagaaggagaggaccgtttctttcctttgtctggatctttaatttttggcaaacaaggaactggaagagacaacgtggatgcggacaaagtcatgataaccaacgaagaagaaattaaaactactaacccggtagcaacggagtcctatggacaagtggccacaaaccaccagagtgcgcaggcgtattcgacggatgagaggatgcaggcgcagaccggctgggttcaaaaccaaggaatacttccgggtatggtttggcaggacagagatgtgtacctgcaaggacccatttgggccaaaattcctcacacggacggcaactttcacccttctccgctgatgggagggtttggaatgaagcacccgcctcctcagatcctcatcaaaaacacacctgtacctgccgatcctccaacggccttcaacaaggacaagctgaactctttcatcacccagtattctactggccaagtcagcgtggagatcgagtgggagctgcagaaggaaaacagcaagcggtggaacccggagatccagtacacttccaactattacaagtctaataatgttgaatttgctgttaatactgaaggtgtatatagtgaaccccgccccattggcaccagatacctgactcgtaatctgtaa

SEQ ID NO: 3634 - DNA, 2232 bp, synthetic construct
  source 1..2232: mol_type = other DNA
atggctgccgatggttatcttccagattggctcgaggacaaccttagtgaaggaattcgcgagtggtgggctttgaaacctggagcccctcaacccaaggcaaatcaacaacatcaagacaacgctcgaggtcttgtgcttccgggttacaaataccttggacccggcaacggactcgacaagggggagccggtcaacgcagcagacgcggcggccctcgagcacgacaaggcctacgaccagcagctcaaggccggagacaacccgtacctcaagtacaaccacgccgacgccgagttccaggagcggctcaaagaagatacgtcttttgggggcaacctcgggcgagcagtcttccaggccaaaaagaggcttcttgaacctcttggtctggttgaggaagcggctaagacggctcctggaaagaagaggcctgtagagcagtctcctcaggaaccggactcctccgcgggtattggcaaatcgggtgcacagcccgctaaaaagagactcaatttcggtcagactggcgacacagagtcagtcccagaccctcaaccaatcggagaacctcccgcagccccctcaggtgtgggatctcttacaatggcttcaggtggtggcgcaccagtggcagacaataacgaaggtgccgatggagtgggtagttcctcgggaaattggcattgcgattcccaatggctgggggacagagtcatcaccaccagcacccgaacctgggccctgcccacctacaacaatcacctctacaagcaaatctccaacagcacatctggaggatcttcaaatgacaacgcctacttcggctacagcaccccctgggggtattttgacttcaacagattccactgccacttctcaccacgtgactggcagcgactcatcaacaacaactggggattccggcctaagcgactcaacttcaagctcttcaacattcaggtcaaagaggttacggacaacaatggagtcaagaccatcgccaataaccttaccagcacggtccaggtcttcacggactcagactatcagctcccgtacgtgctcgggtcggctcacgagggctgcctcccgccgttcccagcggacgttttcatgattcctcagtacgggtatctgacgcttaatgatggaagccaggccgtgggtcgttcgtccttttactgcctggaatatttcccgtcgcaaatgctaagaacgggtaacaacttccagttcagctacgagtttgagaacgtacctttccatagcagctacgctcacagccaaagcctggaccgactaatgaatccactcatcgaccaatacttgtactatctctcaaagactattaacggttctggacagaatcaacaaacgctaaaattcagtgtggccggacccagcaacatggctgtccagggaagaaactacatacctggacccagctaccgacaacaacgtgtctcaaccactgtgactcaaaacaacaacagcgaatttgcttggcctggagcttcttcttgggctctcaatggacgtaatagcttgatgaatcctggacctgctatggccagccacaaagaaggagaggaccgtttctttcctttgtctggatctttaatttttggcaaacaaggaactggaagagacaacgtggatgcggacaaagtcatgataaccaacgaagaagaaattaaaactactaacccggtagcaacggagtcctatggacaagtggccacaaaccaccagagtgcgcaggcgtattcgacggatgagaggaagcaggcgcagaccggctgggttcaaaaccaaggaatacttccgggtatggtttggcaggacagagatgtgtacctgcaaggacccatttgggccaaaattcctcacacggacggcaactttcacccttctccgctgatgggagggtttggaatgaagcacccgcctcctcagatcctcatcaaaaacacacctgtacctgccgatcctccaacggccttcaacaaggacaagctgaactctttcatcacccagtattctactggccaagtcagcgtggagatcgagtgggagctgcagaaggaaaacagcaagcggtggaacccggagatccagtacacttccaactattacaagtctaataatgttgaatttgctgttaatactgaaggtgtatatagtgaaccccgccccattggcaccagatacctgactcgtaatctgtaa

SEQ ID NO: 3635 - DNA, 2232 bp, synthetic construct
  source 1..2232: mol_type = other DNA
atggctgccgatggttatcttccagattggctcgaggacaaccttagtgaaggaattcgcgagtggtgggctttgaaacctggagcccctcaacccaaggcaaatcaacaacatcaagacaacgctcgaggtcttgtgcttccgggttacaaataccttggacccggcaacggactcgacaagggggagccggtcaacgcagcagacgcggcggccctcgagcacgacaaggcctacgaccagcagctcaaggccggagacaacccgtacctcaagtacaaccacgccgacgccgagttccaggagcggctcaaagaagatacgtcttttgggggcaacctcgggcgagcagtcttccaggccaaaaagaggcttcttgaacctcttggtctggttgaggaagcggctaagacggctcctggaaagaagaggcctgtagagcagtctcctcaggaaccggactcctccgcgggtattggcaaatcgggtgcacagcccgctaaaaagagactcaatttcggtcagactggcgacacagagtcagtcccagaccctcaaccaatcggagaacctcccgcagccccctcaggtgtgggatctcttacaatggcttcaggtggtggcgcaccagtggcagacaataacgaaggtgccgatggagtgggtagttcctcgggaaattggcattgcgattcccaatggctgggggacagagtcatcaccaccagcacccgaacctgggccctgcccacctacaacaatcacctctacaagcaaatctccaacagcacatctggaggatcttcaaatgacaacgcctacttcggctacagcaccccctgggggtattttgacttcaacagattccactgccacttctcaccacgtgactggcagcgactcatcaacaacaactggggattccggcctaagcgactcaacttcaagctcttcaacattcaggtcaaagaggttacggacaacaatggagtcaagaccatcgccaataaccttaccagcacggtccaggtcttcacggactcagactatcagctcccgtacgtgctcgggtcggctcacgagggctgcctcccgccgttcccagcggacgttttcatgattcctcagtacgggtatctgacgcttaatgatggaagccaggccgtgggtcgttcgtccttttactgcctggaatatttcccgtcgcaaatgctaagaacgggtaacaacttccagttcagctacgagtttgagaacgtacctttccatagcagctacgctcacagccaaagcctggaccgactaatgaatccactcatcgaccaatacttgtactatctctcaaagactattaacggttctggacagaatcaacaaacgctaaaattcagtgtggccggacccagcaacatggctgtccagggaagaaactacatacctggacccagctaccgacaacaacgtgtctcaaccactgtgactcaaaacaacaacagcgaatttgcttggcctggagcttcttcttgggctctcaatggacgtaatagcttgatgaatcctggacctgctatggccagccacaaagaaggagaggaccgtttctttcctttgtctggatctttaatttttggcaaacaaggaactggaagagacaacgtggatgcggacaaagtcatgataaccaacgaagaagaaattaaaactactaacccggtagcaacggagtcctatggacaagtggccacaaaccaccagagtgcacaggcttatgtttcgtctgttaagatgcaggcgcagaccggctgggttcaaaaccaaggaatacttccgggtatggtttggcaggacagagatgtgtacctgcaaggacccatttgggccaaaattcctcacacggacggcaactttcacccttctccgctgatgggagggtttggaatgaagcacccgcctcctcagatcctcatcaaaaacacacctgtacctgccgatcctccaacggccttcaacaaggacaagctgaactctttcatcacccagtattctactggccaagtcagcgtggagatcgagtgggagctgcagaaggaaaacagcaagcggtggaacccggagatccagtacacttccaactattacaagtctaataatgttgaatttgctgttaatactgaaggtgtatatagtgaaccccgccccattggcaccagatacctgactcgtaatctgtaa

SEQ ID NO: 3636 - protein, 743 aa, synthetic construct
MAADGYLPDWLEDNLSEGIREWWALKPGAPQPKANQQHQDNARGLVLPGYKYLGPGNGLDKGEPVNAADAAALEHDKAYDQQLKAGDNPYLKYNHADAEFQERLKEDTSFGGNLGRAVFQAKKRLLEPLGLVEEAAKTAPGKKRPVEQSPQEPDSSAGIGKSGAQPAKKRLNFGQTGDTESVPDPQPIGEPPAAPSGVGSLTMASGGGAPVADNNEGADGVGSSSGNWHCDSQWLGDRVITTSTRTWALPTYNNHLYKQISNSTSGGSSNDNAYFGYSTPWGYFDFNRFHCHFSPRDWQRLINNNWGFRPKRLNFKLFNIQVKEVTDNNGVKTIANNLTSTVQVFTDSDYQLPYVLGSAHEGCLPPFPADVFMIPQYGYLTLNDGSQAVGRSSFYCLEYFPSQMLRTGNNFQFSYEFENVPFHSSYAHSQSLDRLMNPLIDQYLYYLSKTINGSGQNQQTLKFSVAGPSNMAVQGRNYIPGPSYRQQRVSTTVTQNNNSEFAWPGASSWALNGRNSLMNPGPAMASHKEGEDRFFPLSGSLIFGKQGTGRDNVDADKVMITNEEEIKTTNPVATESYGQVATNHQSPLNGAVHLYAQAQTGWVQNQGILPGMVWQDRDVYLQGPIWAKIPHTDGNFHPSPLMGGFGMKHPPPQILIKNTPVPADPPTAFNKDKLNSFITQYSTGQVSVEIEWELQKENSKRWNPEIQYTSNYYKSNNVEFAVNTEGVYSEPRPIGTRYLTRNL

SEQ ID NO: 3637 - protein, 743 aa, synthetic construct
MAADGYLPDWLEDNLSEGIREWWALKPGAPQPKANQQHQDNARGLVLPGYKYLGPGNGLDKGEPVNAADAAALEHDKAYDQQLKAGDNPYLKYNHADAEFQERLKEDTSFGGNLGRAVFQAKKRLLEPLGLVEEAAKTAPGKKRPVEQSPQEPDSSAGIGKSGAQPAKKRLNFGQTGDTESVPDPQPIGEPPAAPSGVGSLTMASGGGAPVADNNEGADGVGSSSGNWHCDSQWLGDRVITTSTRTWALPTYNNHLYKQISNSTSGGSSNDNAYFGYSTPWGYFDFNRFHCHFSPRDWQRLINNNWGFRPKRLNFKLFNIQVKEVTDNNGVKTIANNLTSTVQVFTDSDYQLPYVLGSAHEGCLPPFPADVFMIPQYGYLTLNDGSQAVGRSSFYCLEYFPSQMLRTGNNFQFSYEFENVPFHSSYAHSQSLDRLMNPLIDQYLYYLSKTINGSGQNQQTLKFSVAGPSNMAVQGRNYIPGPSYRQQRVSTTVTQNNNSEFAWPGASSWALNGRNSLMNPGPAMASHKEGEDRFFPLSGSLIFGKQGTGRDNVDADKVMITNEEEIKTTNPVATESYGQVATNHQSAQARDSPKGWQAQTGWVQNQGILPGMVWQDRDVYLQGPIWAKIPHTDGNFHPSPLMGGFGMKHPPPQILIKNTPVPADPPTAFNKDKLNSFITQYSTGQVSVEIEWELQKENSKRWNPEIQYTSNYYKSNNVEFAVNTEGVYSEPRPIGTRYLTRNL

SEQ ID NO: 3638 - protein, 743 aa, synthetic construct
MAADGYLPDWLEDNLSEGIREWWALKPGAPQPKANQQHQDNARGLVLPGYKYLGPGNGLDKGEPVNAADAAALEHDKAYDQQLKAGDNPYLKYNHADAEFQERLKEDTSFGGNLGRAVFQAKKRLLEPLGLVEEAAKTAPGKKRPVEQSPQEPDSSAGIGKSGAQPAKKRLNFGQTGDTESVPDPQPIGEPPAAPSGVGSLTMASGGGAPVADNNEGADGVGSSSGNWHCDSQWLGDRVITTSTRTWALPTYNNHLYKQISNSTSGGSSNDNAYFGYSTPWGYFDFNRFHCHFSPRDWQRLINNNWGFRPKRLNFKLFNIQVKEVTDNNGVKTIANNLTSTVQVFTDSDYQLPYVLGSAHEGCLPPFPADVFMIPQYGYLTLNDGSQAVGRSSFYCLEYFPSQMLRTGNNFQFSYEFENVPFHSSYAHSQSLDRLMNPLIDQYLYYLSKTINGSGQNQQTLKFSVAGPSNMAVQGRNYIPGPSYRQQRVSTTVTQNNNSEFAWPGASSWALNGRNSLMNPGPAMASHKEGEDRFFPLSGSLIFGKQGTGRDNVDADKVMITNEEEIKTTNPVATESYGQVATNHQSAQAYSTDVRMQAQTGWVQNQGILPGMVWQDRDVYLQGPIWAKIPHTDGNFHPSPLMGGFGMKHPPPQILIKNTPVPADPPTAFNKDKLNSFITQYSTGQVSVEIEWELQKENSKRWNPEIQYTSNYYKSNNVEFAVNTEGVYSEPRPIGTRYLTRNL

SEQ ID NO: 3639 - protein, 743 aa, synthetic construct
MAADGYLPDWLEDNLSEGIREWWALKPGAPQPKANQQHQDNARGLVLPGYKYLGPGNGLDKGEPVNAADAAALEHDKAYDQQLKAGDNPYLKYNHADAEFQERLKEDTSFGGNLGRAVFQAKKRLLEPLGLVEEAAKTAPGKKRPVEQSPQEPDSSAGIGKSGAQPAKKRLNFGQTGDTESVPDPQPIGEPPAAPSGVGSLTMASGGGAPVADNNEGADGVGSSSGNWHCDSQWLGDRVITTSTRTWALPTYNNHLYKQISNSTSGGSSNDNAYFGYSTPWGYFDFNRFHCHFSPRDWQRLINNNWGFRPKRLNFKLFNIQVKEVTDNNGVKTIANNLTSTVQVFTDSDYQLPYVLGSAHEGCLPPFPADVFMIPQYGYLTLNDGSQAVGRSSFYCLEYFPSQMLRTGNNFQFSYEFENVPFHSSYAHSQSLDRLMNPLIDQYLYYLSKTINGSGQNQQTLKFSVAGPSNMAVQGRNYIPGPSYRQQRVSTTVTQNNNSEFAWPGASSWALNGRNSLMNPGPAMASHKEGEDRFFPLSGSLIFGKQGTGRDNVDADKVMITNEEEIKTTNPVATESYGQVATNHQSAQIVMNSLKAQAQTGWVQNQGILPGMVWQDRDVYLQGPIWAKIPHTDGNFHPSPLMGGFGMKHPPPQILIKNTPVPADPPTAFNKDKLNSFITQYSTGQVSVEIEWELQKENSKRWNPEIQYTSNYYKSNNVEFAVNTEGVYSEPRPIGTRYLTRNL

SEQ ID NO: 3640 - protein, 743 aa, synthetic construct
MAADGYLPDWLEDNLSEGIREWWALKPGAPQPKANQQHQDNARGLVLPGYKYLGPGNGLDKGEPVNAADAAALEHDKAYDQQLKAGDNPYLKYNHADAEFQERLKEDTSFGGNLGRAVFQAKKRLLEPLGLVEEAAKTAPGKKRPVEQSPQEPDSSAGIGKSGAQPAKKRLNFGQTGDTESVPDPQPIGEPPAAPSGVGSLTMASGGGAPVADNNEGADGVGSSSGNWHCDSQWLGDRVITTSTRTWALPTYNNHLYKQISNSTSGGSSNDNAYFGYSTPWGYFDFNRFHCHFSPRDWQRLINNNWGFRPKRLNFKLFNIQVKEVTDNNGVKTIANNLTSTVQVFTDSDYQLPYVLGSAHEGCLPPFPADVFMIPQYGYLTLNDGSQAVGRSSFYCLEYFPSQMLRTGNNFQFSYEFENVPFHSSYAHSQSLDRLMNPLIDQYLYYLSKTINGSGQNQQTLKFSVAGPSNMAVQGRNYIPGPSYRQQRVSTTVTQNNNSEFAWPGASSWALNGRNSLMNPGPAMASHKEGEDRFFPLSGSLIFGKQGTGRDNVDADKVMITNEEEIKTTNPVATESYGQVATNHQSAQARESPRGLQAQTGWVQNQGILPGMVWQDRDVYLQGPIWAKIPHTDGNFHPSPLMGGFGMKHPPPQILIKNTPVPADPPTAFNKDKLNSFITQYSTGQVSVEIEWELQKENSKRWNPEIQYTSNYYKSNNVEFAVNTEGVYSEPRPIGTRYLTRNL

SEQ ID NO: 3641 - protein, 743 aa, synthetic construct
MAADGYLPDWLEDNLSEGIREWWALKPGAPQPKANQQHQDNARGLVLPGYKYLGPGNGLDKGEPVNAADAAALEHDKAYDQQLKAGDNPYLKYNHADAEFQERLKEDTSFGGNLGRAVFQAKKRLLEPLGLVEEAAKTAPGKKRPVEQSPQEPDSSAGIGKSGAQPAKKRLNFGQTGDTESVPDPQPIGEPPAAPSGVGSLTMASGGGAPVADNNEGADGVGSSSGNWHCDSQWLGDRVITTSTRTWALPTYNNHLYKQISNSTSGGSSNDNAYFGYSTPWGYFDFNRFHCHFSPRDWQRLINNNWGFRPKRLNFKLFNIQVKEVTDNNGVKTIANNLTSTVQVFTDSDYQLPYVLGSAHEGCLPPFPADVFMIPQYGYLTLNDGSQAVGRSSFYCLEYFPSQMLRTGNNFQFSYEFENVPFHSSYAHSQSLDRLMNPLIDQYLYYLSKTINGSGQNQQTLKFSVAGPSNMAVQGRNYIPGPSYRQQRVSTTVTQNNNSEFAWPGASSWALNGRNSLMNPGPAMASHKEGEDRFFPLSGSLIFGKQGTGRDNVDADKVMITNEEEIKTTNPVATESYGQVATNHQSAQASFNDTRAQAQTGWVQNQGILPGMVWQDRDVYLQGPIWAKIPHTDGNFHPSPLMGGFGMKHPPPQILIKNTPVPADPPTAFNKDKLNSFITQYSTGQVSVEIEWELQKENSKRWNPEIQYTSNYYKSNNVEFAVNTEGVYSEPRPIGTRYLTRNL

SEQ ID NO: 3642 - protein, 743 aa, synthetic construct
MAADGYLPDWLEDNLSEGIREWWALKPGAPQPKANQQHQDNARGLVLPGYKYLGPGNGLDKGEPVNAADAAALEHDKAYDQQLKAGDNPYLKYNHADAEFQERLKEDTSFGGNLGRAVFQAKKRLLEPLGLVEEAAKTAPGKKRPVEQSPQEPDSSAGIGKSGAQPAKKRLNFGQTGDTESVPDPQPIGEPPAAPSGVGSLTMASGGGAPVADNNEGADGVGSSSGNWHCDSQWLGDRVITTSTRTWALPTYNNHLYKQISNSTSGGSSNDNAYFGYSTPWGYFDFNRFHCHFSPRDWQRLINNNWGFRPKRLNFKLFNIQVKEVTDNNGVKTIANNLTSTVQVFTDSDYQLPYVLGSAHEGCLPPFPADVFMIPQYGYLTLNDGSQAVGRSSFYCLEYFPSQMLRTGNNFQFSYEFENVPFHSSYAHSQSLDRLMNPLIDQYLYYLSKTINGSGQNQQTLKFSVAGPSNMAVQGRNYIPGPSYRQQRVSTTVTQNNNSEFAWPGASSWALNGRNSLMNPGPAMASHKEGEDRFFPLSGSLIFGKQGTGRDNVDADKVMITNEEEIKTTNPVATESYGQVATNHQSGGTLAVVSLAQAQTGWVQNQGILPGMVWQDRDVYLQGPIWAKIPHTDGNFHPSPLMGGFGMKHPPPQILIKNTPVPADPPTAFNKDKLNSFITQYSTGQVSVEIEWELQKENSKRWNPEIQYTSNYYKSNNVEFAVNTEGVYSEPRPIGTRYLTRNL

SEQ ID NO: 3643 - protein, 743 aa, synthetic construct
MAADGYLPDWLEDNLSEGIREWWALKPGAPQPKANQQHQDNARGLVLPGYKYLGPGNGLDKGEPVNAADAAALEHDKAYDQQLKAGDNPYLKYNHADAEFQERLKEDTSFGGNLGRAVFQAKKRLLEPLGLVEEAAKTAPGKKRPVEQSPQEPDSSAGIGKSGAQPAKKRLNFGQTGDTESVPDPQPIGEPPAAPSGVGSLTMASGGGAPVADNNEGADGVGSSSGNWHCDSQWLGDRVITTSTRTWALPTYNNHLYKQISNSTSGGSSNDNAYFGYSTPWGYFDFNRFHCHFSPRDWQRLINNNWGFRPKRLNFKLFNIQVKEVTDNNGVKTIANNLTSTVQVFTDSDYQLPYVLGSAHEGCLPPFPADVFMIPQYGYLTLNDGSQAVGRSSFYCLEYFPSQMLRTGNNFQFSYEFENVPFHSSYAHSQSLDRLMNPLIDQYLYYLSKTINGSGQNQQTLKFSVAGPSNMAVQGRNYIPGPSYRQQRVSTTVTQNNNSEFAWPGASSWALNGRNSLMNPGPAMASHKEGEDRFFPLSGSLIFGKQGTGRDNVDADKVMITNEEEIKTTNPVATESYGQVATNHQSAQAYGLPKGPQAQTGWVQNQGILPGMVWQDRDVYLQGPIWAKIPHTDGNFHPSPLMGGFGMKHPPPQILIKNTPVPADPPTAFNKDKLNSFITQYSTGQVSVEIEWELQKENSKRWNPEIQYTSNYYKSNNVEFAVNTEGVYSEPRPIGTRYLTRNL

SEQ ID NO: 3644 - protein, 743 aa, synthetic construct
MAADGYLPDWLEDNLSEGIREWWALKPGAPQPKANQQHQDNARGLVLPGYKYLGPGNGLDKGEPVNAADAAALEHDKAYDQQLKAGDNPYLKYNHADAEFQERLKEDTSFGGNLGRAVFQAKKRLLEPLGLVEEAAKTAPGKKRPVEQSPQEPDSSAGIGKSGAQPAKKRLNFGQTGDTESVPDPQPIGEPPAAPSGVGSLTMASGGGAPVADNNEGADGVGSSSGNWHCDSQWLGDRVITTSTRTWALPTYNNHLYKQISNSTSGGSSNDNAYFGYSTPWGYFDFNRFHCHFSPRDWQRLINNNWGFRPKRLNFKLFNIQVKEVTDNNGVKTIANNLTSTVQVFTDSDYQLPYVLGSAHEGCLPPFPADVFMIPQYGYLTLNDGSQAVGRSSFYCLEYFPSQMLRTGNNFQFSYEFENVPFHSSYAHSQSLDRLMNPLIDQYLYYLSKTINGSGQNQQTLKFSVAGPSNMAVQGRNYIPGPSYRQQRVSTTVTQNNNSEFAWPGASSWALNGRNSLMNPGPAMASHKEGEDRFFPLSGSLIFGKQGTGRDNVDADKVMITNEEEIKTTNPVATESYGQVATNHQSAQASTGTLRLQAQTGWVQNQGILPGMVWQDRDVYLQGPIWAKIPHTDGNFHPSPLMGGFGMKHPPPQILIKNTPVPADPPTAFNKDKLNSFITQYSTGQVSVEIEWELQKENSKRWNPEIQYTSNYYKSNNVEFAVNTEGVYSEPRPIGTRYLTRNL

SEQ ID NO: 3645 - protein, 743 aa, synthetic construct
MAADGYLPDWLEDNLSEGIREWWALKPGAPQPKANQQHQDNARGLVLPGYKYLGPGNGLDKGEPVNAADAAALEHDKAYDQQLKAGDNPYLKYNHADAEFQERLKEDTSFGGNLGRAVFQAKKRLLEPLGLVEEAAKTAPGKKRPVEQSPQEPDSSAGIGKSGAQPAKKRLNFGQTGDTESVPDPQPIGEPPAAPSGVGSLTMASGGGAPVADNNEGADGVGSSSGNWHCDSQWLGDRVITTSTRTWALPTYNNHLYKQISNSTSGGSSNDNAYFGYSTPWGYFDFNRFHCHFSPRDWQRLINNNWGFRPKRLNFKLFNIQVKEVTDNNGVKTIANNLTSTVQVFTDSDYQLPYVLGSAHEGCLPPFPADVFMIPQYGYLTLNDGSQAVGRSSFYCLEYFPSQMLRTGNNFQFSYEFENVPFHSSYAHSQSLDRLMNPLIDQYLYYLSKTINGSGQNQQTLKFSVAGPSNMAVQGRNYIPGPSYRQQRVSTTVTQNNNSEFAWPGASSWALNGRNSLMNPGPAMASHKEGEDRFFPLSGSLIFGKQGTGRDNVDADKVMITNEEEIKTTNPVATESYGQVATNHQSAQAYSTDERMQAQTGWVQNQGILPGMVWQDRDVYLQGPIWAKIPHTDGNFHPSPLMGGFGMKHPPPQILIKNTPVPADPPTAFNKDKLNSFITQYSTGQVSVEIEWELQKENSKRWNPEIQYTSNYYKSNNVEFAVNTEGVYSEPRPIGTRYLTRNL

SEQ ID NO: 3646 - protein, 743 aa, synthetic construct
MAADGYLPDWLEDNLSEGIREWWALKPGAPQPKANQQHQDNARGLVLPGYKYLGPGNGLDKGEPVNAADAAALEHDKAYDQQLKAGDNPYLKYNHADAEFQERLKEDTSFGGNLGRAVFQAKKRLLEPLGLVEEAAKTAPGKKRPVEQSPQEPDSSAGIGKSGAQPAKKRLNFGQTGDTESVPDPQPIGEPPAAPSGVGSLTMASGGGAPVADNNEGADGVGSSSGNWHCDSQWLGDRVITTSTRTWALPTYNNHLYKQISNSTSGGSSNDNAYFGYSTPWGYFDFNRFHCHFSPRDWQRLINNNWGFRPKRLNFKLFNIQVKEVTDNNGVKTIANNLTSTVQVFTDSDYQLPYVLGSAHEGCLPPFPADVFMIPQYGYLTLNDGSQAVGRSSFYCLEYFPSQMLRTGNNFQFSYEFENVPFHSSYAHSQSLDRLMNPLIDQYLYYLSKTINGSGQNQQTLKFSVAGPSNMAVQGRNYIPGPSYRQQRVSTTVTQNNNSEFAWPGASSWALNGRNSLMNPGPAMASHKEGEDRFFPLSGSLIFGKQGTGRDNVDADKVMITNEEEIKTTNPVATESYGQVATNHQSAQAYSTDERKQAQTGWVQNQGILPGMVWQDRDVYLQGPIWAKIPHTDGNFHPSPLMGGFGMKHPPPQILIKNTPVPADPPTAFNKDKLNSFITQYSTGQVSVEIEWELQKENSKRWNPEIQYTSNYYKSNNVEFAVNTEGVYSEPRPIGTRYLTRNL

SEQ ID NO: 3647 - protein, 743 aa, synthetic construct
MAADGYLPDWLEDNLSEGIREWWALKPGAPQPKANQQHQDNARGLVLPGYKYLGPGNGLDKGEPVNAADAAALEHDKAYDQQLKAGDNPYLKYNHADAEFQERLKEDTSFGGNLGRAVFQAKKRLLEPLGLVEEAAKTAPGKKRPVEQSPQEPDSSAGIGKSGAQPAKKRLNFGQTGDTESVPDPQPIGEPPAAPSGVGSLTMASGGGAPVADNNEGADGVGSSSGNWHCDSQWLGDRVITTSTRTWALPTYNNHLYKQISNSTSGGSSNDNAYFGYSTPWGYFDFNRFHCHFSPRDWQRLINNNWGFRPKRLNFKLFNIQVKEVTDNNGVKTIANNLTSTVQVFTDSDYQLPYVLGSAHEGCLPPFPADVFMIPQYGYLTLNDGSQAVGRSSFYCLEYFPSQMLRTGNNFQFSYEFENVPFHSSYAHSQSLDRLMNPLIDQYLYYLSKTINGSGQNQQTLKFSVAGPSNMAVQGRNYIPGPSYRQQRVSTTVTQNNNSEFAWPGASSWALNGRNSLMNPGPAMASHKEGEDRFFPLSGSLIFGKQGTGRDNVDADKVMITNEEEIKTTNPVATESYGQVATNHQSAQAYVSSVKMQAQTGWVQNQGILPGMVWQDRDVYLQGPIWAKIPHTDGNFHPSPLMGGFGMKHPPPQILIKNTPVPADPPTAFNKDKLNSFITQYSTGQVSVEIEWELQKENSKRWNPEIQYTSNYYKSNNVEFAVNTEGVYSEPRPIGTRYLTRNL

SEQ ID NO: 3648 - protein, 9 aa, synthetic construct
PLNGAVHLY

SEQ ID NO: 3649 - protein, 7 aa, synthetic construct
RDSPKGW

SEQ ID NO: 3650 - protein, 7 aa, synthetic construct
YSTDVRM

SEQ ID NO: 3651 - protein, 7 aa, synthetic construct
IVMNSLK

SEQ ID NO: 3652 - protein, 7 aa, synthetic construct
RESPRGL

SEQ ID NO: 3653 - protein, 7 aa, synthetic construct
SFNDTRA

SEQ ID NO: 3654 - protein, 9 aa, synthetic construct
GGTLAVVSL

SEQ ID NO: 3655 - protein, 7 aa, synthetic construct
YGLPKGP

SEQ ID NO: 3656 - protein, 7 aa, synthetic construct
STGTLRL

SEQ ID NO: 3657 - protein, 7 aa, synthetic construct
YSTDERM

SEQ ID NO: 3658 - protein, 7 aa, synthetic construct
YSTDERK

SEQ ID NO: 3659 - protein, 7 aa, synthetic construct
YVSSVKM

SEQ ID NO: 3660 - DNA, 27 bp, synthetic construct
  source 1..27: mol_type = other DNA
ccgcttaatggtgccgtccatctttat

SEQ ID NO: 3661 - DNA, 23 bp, synthetic construct
  source 1..23: mol_type = other DNA
cgtgattctccgaagggttggca

SEQ ID NO: 3662 - DNA, 23 bp, synthetic construct
  source 1..23: mol_type = other DNA
tattctacggatgtgaggatgca

SEQ ID NO: 3663 - DNA, 23 bp, synthetic construct
  source 1..23: mol_type = other DNA
attgttatgaattcgttgaaggc

SEQ ID NO: 3664 - DNA, 23 bp, synthetic construct
  source 1..23: mol_type = other DNA
cgggagagtcctcgtgggctgca

SEQ ID NO: 3665 - DNA, 23 bp, synthetic construct
  source 1..23: mol_type = other DNA
agttttaatgatactagggctca

SEQ ID NO: 3666 - DNA, 27 bp, synthetic construct
  source 1..27: mol_type = other DNA
ggtggtacgttggccgtcgtgtcgctt

SEQ ID NO: 3667 - DNA, 21 bp, synthetic construct
  source 1..21: mol_type = other DNA
tatgggttgccgaagggtcct

SEQ ID NO: 3668 - DNA, 21 bp, synthetic construct
  source 1..21: mol_type = other DNA
tcgactgggacgcttcggctt

SEQ ID NO: 3669 - DNA, 21 bp, synthetic construct
  source 1..21: mol_type = other DNA
tattcgacggatgagaggatg

SEQ ID NO: 3670 - DNA, 21 bp, synthetic construct
  source 1..21: mol_type = other DNA
tattcgacggatgagaggaag

SEQ ID NO: 3671 - DNA, 21 bp, synthetic construct
  source 1..21: mol_type = other DNA
tatgtttcgtctgttaagatg

SEQ ID NO: 3672 - DNA, 23 bp, synthetic construct
  source 1..23: mol_type = other DNA
acaaacaccattgtcacactcca

SEQ ID NO: 3673 - DNA, 71 bp, synthetic construct
  source 1..71: mol_type = other DNA
acaaacaccattgtcacactccacacaaacaccattgtcacactccacacaaacaccattgtcacactcca

SEQ ID NO: 3674 - DNA, 23 bp, synthetic construct
  source 1..23: mol_type = other DNA
tccataaagtaggaaacactaca

SEQ ID NO: 3675 - DNA, 22 bp, synthetic construct
  source 1..22: mol_type = other DNA
agtgaattctaccagtgccata

SEQ ID NO: 3676 - DNA, 24 bp, synthetic construct
  source 1..24: mol_type = other DNA
agtgtgagttctaccattgccaaa

SEQ ID NO: 3677 - DNA, 23 bp, synthetic construct
  source 1..23: mol_type = other DNA
agcaaaaatgtgctagtgccaaa

SEQ ID NO: 3678 - protein, 4 aa, synthetic construct
PLNG

SEQ ID NO: 3679 - protein, 5 aa, synthetic construct
PLNGA

SEQ ID NO: 3680 - protein, 6 aa, synthetic construct
PLNGAV

SEQ ID NO: 3681 - protein, 7 aa, synthetic construct
PLNGAVH

SEQ ID NO: 3682 - protein, 8 aa, synthetic construct
PLNGAVHL

SEQ ID NO: 3683 - protein, 4 aa, synthetic construct
NGAV

SEQ ID NO: 3684 - protein, 4 aa, synthetic construct
GAVH

SEQ ID NO: 3685 - protein, 5 aa, synthetic construct
NGAVH

SEQ ID NO: 3686 - protein, 5 aa, synthetic construct
GAVHL

SEQ ID NO: 3687 - protein, 5 aa, synthetic construct
AVHLY

SEQ ID NO: 3688 - protein, 6 aa, synthetic construct
NGAVHL

SEQ ID NO: 3689 - protein, 7 aa, synthetic construct
NGAVHLY

SEQ ID NO: 3690 - protein, 4 aa, synthetic construct
YSTD

SEQ ID NO: 3691 - protein, 5 aa, synthetic construct
YSTDE

SEQ ID NO: 3692 - protein, 6 aa, synthetic construct
YSTDER

SEQ ID NO: 3693 - protein, 4 aa, synthetic construct
IVMN

SEQ ID NO: 3694 - protein, 5 aa, synthetic construct
IVMNS

SEQ ID NO: 3695 - protein, 6 aa, synthetic construct
IVMNSL

SEQ ID NO: 3696-3699 - skipped (4 entries)

SEQ ID NO: 3700 - protein, 5 aa, synthetic construct
YSTDV

SEQ ID NO: 3701 - protein, 6 aa, synthetic construct
YSTDVR

SEQ ID NO: 3702 - DNA, 12 bp, synthetic construct
  source 1..12: mol_type = other DNA
agaaagaggcga

SEQ ID NO: 3703 - DNA, 12 bp, synthetic construct
  source 1..12: mol_type = other DNA
cgggccaagcgg

SEQ ID NO: 3704 - DNA, 54 bp, synthetic construct; identical to SEQ ID NO: 2034
  source 1..54: mol_type = other DNA

SEQ ID NO: 3705 - DNA, 75 bp, synthetic construct
  source 1..75: mol_type = other DNA
ggaagcggagtgaaacagactttgaattttgaccttctcaagttggcgggagacgtggagtccaaccctggacct

SEQ ID NO: 3706 - DNA, 66 bp, synthetic construct
  source 1..66: mol_type = other DNA
ggaagcggagctactaacttcagcctgctgaagcaggctggagacgtggaggagaaccctggacct

SEQ ID NO: 3707 - DNA, 18 bp, synthetic construct
  source 1..18: mol_type = other DNA
tccggaggcggcggcagc

SEQ ID NO: 3708 - DNA, 45 bp, synthetic construct
  source 1..45: mol_type = other DNA
ggtggtggtggtagcggcggcggcggctctggtggtggtggatcc

SEQ ID NO: 3709 - DNA, 75 bp, synthetic construct
  source 1..75: mol_type = other DNA
ggcggaggtggctccggaggcggaggcagcggcggaggtgggtctggcggaggcgggtgcggcggaggtggctcc

SEQ ID NO: 3710 - DNA, 609 bp, synthetic construct
  source 1..609: mol_type = other DNA
aattccgcccctctcccccccccccctctccctcccccccccctaacgttactggccgaagccgcttggaataaggccggtgtgcgtttgtctatatgttattttccaccatattgccgtcttttggcaatgtgagggcccggaaacctggccctgtcttcttgacgagcattcctaggggtctttcccctctcgccaaaggaatgcaaggtctgttgaatgtcgtgaaggaagcagttcctctggaagcttcttgaagacaaacaacgtctgtagcgaccctttgcaggcagcggaaccccccacctggcgacaggtgcctctgcggccaaaagccacgtgtataagatacacctgcaaaggcggcacaaccccagtgccacgttgtgagttggatagttgtggaaagagtcaaatggctctcctcaagcgtattcaacaaggggctgaaggatgcccagaaggtaccccattgtatgggatctgatctggggcctcggtgcacatgctttacatgtgtttagtcgaggttaaaaaaacgtctaggccccccgaaccacggggacgtggttttcctttgaaaaacacgatgataatatggccacaacc

SEQ ID NO: 3711 - DNA, 623 bp, synthetic construct
  source 1..623: mol_type = other DNA
taacgaattccgcccctctcccccccccccctctccctcccccccccctaacgttactggccgaagccgcttggaataaggccggtgtgcgtttgtctatatgttattttccaccatattgccgtcttttggcaatgtgagggcccggaaacctggccctgtcttcttgacgagcattcctaggggtctttcccctctcgccaaaggaatgcaaggtctgttgaatgtcgtgaaggaagcagttcctctggaagcttcttgaagacaaacaacgtctgtagcgaccctttgcaggcagcggaaccccccacctggcgacaggtgcctctgcggccaaaagccacgtgtataagatacacctgcaaaggcggcacaaccccagtgccacgttgtgagttggatagttgtggaaagagtcaaatggctctcctcaagcgtattcaacaaggggctgaaggatgcccagaaggtaccccattgtatgggatctgatctggggcctcggtgcacatgctttacatgtgtttagtcgaggttaaaaaaacgtctaggccccccgaaccacggggacgtggttttcctttgaaaaacacgatgataatatggccacaaccgccgccacc

SEQ ID NO: 3712 - DNA, 54 bp, synthetic construct
  source 1..54: mol_type = other DNA
gtggagaggaagtgctgcgtggagtgcccaccatgccctgcccctcctgtggcc

SEQ ID NO: 3713 - DNA, 108 bp, synthetic construct
  source 1..108: mol_type = other DNA
gagctcaaaaccccacttggtgacacaactcacacatgcccacggtgcccagagcccaaatcttgtgacacacctcccccgtgcccacggtgcccagcacctgaactc

SEQ ID NO: 3714 - DNA, 153 bp, synthetic construct
  source 1..153: mol_type = other DNA
gagctcaaaaccccacttggtgacacaactcacacatgcccacggtgcccagagcccaaatcttgtgacacacctcccccgtgcccacggtgcccagagcccaaatcttgtgacacacctcccccatgcccacggtgcccagcacctgaactc

SEQ ID NO: 3715 - DNA, 198 bp, synthetic construct
  source 1..198: mol_type = other DNA
gagctcaaaaccccacttggtgacacaactcacacatgcccacggtgcccagagcccaaatcttgtgacacacctcccccgtgcccacggtgcccagagcccaaatcttgtgacacacctcccccatgcccacggtgcccagagcccaaatcttgtgacacacctcccccgtgcccaaggtgcccagcacctgaactc

SEQ ID NO: 3716 - DNA, 45 bp, synthetic construct
  source 1..45: mol_type = other DNA
gtgcccagggattgtggttgtaagccttgcatatgtacagtccca

SEQ ID NO: 3717 - DNA, 18 bp, synthetic construct
  source 1..18: mol_type = other DNA
gtgcccagggattgtggt

SEQ ID NO: 3718 - DNA, 198 bp, synthetic construct
  source 1..198: mol_type = other DNA
gagctcaaaaccccacttggtgacacaactcacacatgcccacggtgcccagagcccaaatcttgtgacacacctcccccgtgcccacggtgcccagagcccaaatcttgtgacacaactcacacatgcccacggtgcccagagcccaaatcttgtgacacacctcccccgtgcccaaggtgcccagcacctgaactc

SEQ ID NO: 3719 - DNA, 15 bp, synthetic construct
  source 1..15: mol_type = other DNA
ggtggtggtggatcc

SEQ ID NO: 3720 - DNA, 30 bp, synthetic construct
  source 1..30: mol_type = other DNA
ggtggtggtggatccggtggtggtggatcc

SEQ ID NO: 3721 - DNA, 45 bp, synthetic construct
  source 1..45: mol_type = other DNA
ggtggtggtggatccggtggtggtggatccggtggtggtggatcc

SEQ ID NO: 3722 - DNA, 60 bp, synthetic construct
  source 1..60: mol_type = other DNA
ggtggtggtggatccggtggtggtggatccggtggtggtggatccggtggtggtggatcc

SEQ ID NO: 3723 - DNA, 75 bp, synthetic construct
  source 1..75: mol_type = other DNA
ggtggtggtggtagcggcggcggcggctctggtggtggtggatccggtggtggtggatccggtggtggtggatcc

SEQ ID NO: 3724 - DNA, 75 bp, synthetic construct
  source 1..75: mol_type = other DNA
ggtggtggtggatccggtggtggtggatccggtggtggtggatccggtggtggtggatccggtggtggtggatcc

SEQ ID NO: 3725 - DNA, 90 bp, synthetic construct
  source 1..90: mol_type = other DNA
ggtggtggtggtagcggcggcggcggctctggtggtggtggatccggtggtggtggatccggtggtggtggatccggtggtggtggatcc

SEQ ID NO: 3726 - DNA, 120 bp, synthetic construct
  source 1..120: mol_type = other DNA
ggtggtggtggtagcggcggcggcggctctggtggtggtggatccggtggtggtggatccggtggtggtggatccggtggtggtggatccggtggtggtggatccggtggtggtggatcc

SEQ ID NO: 3727 - DNA, 120 bp, synthetic construct
  source 1..120: mol_type = other DNA
ggtggtggtggatccggtggtggtggatccggtggtggtggatccggtggtggtggatccggtggtggtggatccggtggtggtggatccggtggtggtggatccggtggtggtggatcc

SEQ ID NO: 3728 - DNA, 60 bp, synthetic construct
  source 1..60: mol_type = other DNA
ggtggtggtggtagcggcggcggcggctctggtggtggtggatccggtggtggtggatcc

SEQ ID NO: 3729 - DNA, 90 bp, synthetic construct
  source 1..90: mol_type = other DNA
ggtggtggtggatccggtggtggtggatccggtggtggtggatccggtggtggtggatccggtggtggtggatccggtggtggtggatcc

SEQ ID NO: 3730 - DNA, 15 bp, synthetic construct
  source 1..15: mol_type = other DNA
ggaggaggaggaagt

SEQ ID NO: 3731 - DNA, 15 bp, synthetic construct
  source 1..15: mol_type = other DNA
ggaggtggaggttct

SEQ ID NO: 3732 - protein, 6 aa, synthetic construct
GGCTCT

SEQ ID NO: 3733 - DNA, 45 bp, synthetic construct
  source 1..45: mol_type = other DNA
ggtggtggtggatccggaggaggaggaagtggaggtggaggttct

SEQ ID NO: 3734 - protein, 15 aa, synthetic construct
GGGGSGGGGSGGGGS

SEQ ID NO: 3735-4534 - skipped (800 entries)

SEQ ID NO: 4535 - protein, 5 aa, synthetic construct
GGGGS

SEQ ID NO: 4536 - skipped

SEQ ID NO: 4537 - protein, 15 aa, synthetic construct
GGGGSGGGGSGGGGS

SEQ ID NO: 4538 - protein, 25 aa, synthetic construct
GGGGSGGGGSGGGGSGGGGSGGGGS

SEQ ID NO: 4539 - protein, 10 aa, synthetic construct
GGGGSGGGGS

SEQ ID NO: 4540 - protein, 20 aa, synthetic construct
GGGGSGGGGSGGGGSGGGGS

SEQ ID NO: 4541-4544 - skipped (4 entries)

SEQ ID NO: 4545 - protein, 4 aa, unidentified
KDEL

SEQ ID NO: 4546-4678 - skipped (133 entries)

SEQ ID NO: 4679 - DNA, 22 bp, synthetic construct
  source 1..22: mol_type = other DNA
atacatacttctttacattcca

SEQ ID NO: 4680 - protein, 4 aa, synthetic construct
VHLY

SEQ ID NO: 4681 - protein, 4 aa, synthetic construct
VHIY

SEQ ID NO: 4682 - protein, 4 aa, synthetic construct
VHVY

SEQ ID NO: 4683 - protein, 4 aa, synthetic construct
VHHY

SEQ ID NO: 4684 - protein, 5 aa, synthetic construct
SLNGA

SEQ ID NO: 4685 - protein, 5 aa, synthetic construct
QLNGA

SEQ ID NO: 4686 - protein, 5 aa, synthetic construct
ALNGA

SEQ ID NO: 4687 - protein, 5 aa, synthetic construct
PLNGS

SEQ ID NO: 4688 - protein, 5 aa, synthetic construct
PVNGA

SEQ ID NO: 4689 - protein, 5 aa, synthetic construct
PLNGG

SEQ ID NO: 4690 - protein, 5 aa, synthetic construct
PLNGT

SEQ ID NO: 4691 - protein, 5 aa, synthetic construct
PLDGA

SEQ ID NO: 4692 - protein, 5 aa, synthetic construct
QLNGS

SEQ ID NO: 4693 - protein, 5 aa, synthetic construct
PLNGN

SEQ ID NO: 4694 - protein, 5 aa, synthetic construct
SLDGA

SEQ ID NO: 4695 - protein, 5 aa, synthetic construct
HLNGA

SEQ ID NO: 4696 - protein, 5 aa, synthetic construct
ALNGT

SEQ ID NO: 4697 - protein, 5 aa, synthetic construct
PINGA

SEQ ID NO: 4698 - protein, 5 aa, synthetic construct
ALDGA

SEQ ID NO: 4699 - protein, 5 aa, synthetic construct
PLNCA

SEQ ID NO: 4700 - protein, 5 aa, synthetic construct
PLNGQ

SEQ ID NO: 4701 - protein, 5 aa, synthetic construct
PLDSA

SEQ ID NO: 4702 - protein, 5 aa, synthetic construct
RLDGA

SEQ ID NO: 4703 - protein, 5 aa, synthetic construct
QLNGN

SEQ ID NO: 4704 - protein, 5 aa, synthetic construct
PLNGY

SEQ ID NO: 4705 - protein, 5 aa, synthetic construct
PLDSS

SEQ ID NO: 4706 - protein, 5 aa, synthetic construct
PLNGC

SEQ ID NO: 4707 - protein, 5 aa, synthetic construct
PLYGA

SEQ ID NO: 4708 - protein, 5 aa, synthetic construct
TLNGA

SEQ ID NO: 4709 - protein, 5 aa, synthetic construct
PVDGA

SEQ ID NO: 4710 - protein, 5 aa, synthetic construct
PLKGA

SEQ ID NO: 4711 - protein, 5 aa, synthetic construct
PLNGD

SEQ ID NO: 4712 - protein, 5 aa, synthetic construct
KLDGA

SEQ ID NO: 4713 - protein, 5 aa, synthetic construct
PHNGA

SEQ ID NO: 4714 - protein, 5 aa, synthetic construct
PLNGV

SEQ ID NO: 4715 - protein, 5 aa, synthetic construct
PLNAA

SEQ ID NO: 4716 - protein, 5 aa, synthetic construct
QLNGY

SEQ ID NO: 4717 - protein, 5 aa, synthetic construct
PLDGS

SEQ ID NO: 4718 - protein, 5 aa, synthetic construct
LLNGA

SEQ ID NO: 4719 - protein, 5 aa, synthetic construct
PLNRA

SEQ ID NO: 4720 - protein, 5 aa, synthetic construct
PLIGA

SEQ ID NO: 4721 - protein, 5 aa, synthetic construct
PRNGA

SEQ ID NO: 4722 - protein, 5 aa, synthetic construct
ALNGS

SEQ ID NO: 4723 - protein, 4 aa, synthetic construct
VPLY

SEQ ID NO: 4724 - protein, 4 aa, synthetic construct
VNLY

SEQ ID NO: 4725 - protein, 4 aa, synthetic construct
VHRY

SEQ ID NO: 4726 - protein, 4 aa, synthetic construct
FHLY

SEQ ID NO: 4727 - protein, 4 aa, synthetic construct
LHLY

SEQ ID NO: 4728 - protein, 4 aa, synthetic construct
DHLY

SEQ ID NO: 4729 - protein, 4 aa, synthetic construct
VQLY

SEQ ID NO: 4730 - protein, 4 aa, synthetic construct
IHLY

SEQ ID NO: 4731 - protein, 4 aa, synthetic construct
VDLY

SEQ ID NO: 4732 - protein, 4 aa, synthetic construct
AHLY

SEQ ID NO: 4733 - protein, 4 aa, synthetic construct
VLLY

SEQ ID NO: 4734 - protein, 4 aa, synthetic construct
GHLY

SEQ ID NO: 4735 - protein, 4 aa, synthetic construct
VRLY

SEQ ID NO: 4736 - protein, 4 aa, synthetic construct
VYLY

SEQ ID NO: 4737 - protein, 4 aa, synthetic construct
AQAQ

SEQ ID NO: 4738 - protein, 4 aa, synthetic construct
SQAQ

SEQ ID NO: 4739 - protein, 4 aa, synthetic construct
AQPQ

SEQ ID NO: 4740 - protein, 4 aa, synthetic construct
AQSQ

SEQ ID NO: 4741 - protein, 4 aa, synthetic construct
AKAQ

SEQ ID NO: 4742 - protein, 4 aa, synthetic construct
AHAQ

SEQ ID NO: 4743 - protein, 4 aa, synthetic construct
AQAP

SEQ ID NO: 4744 - protein, 4 aa, synthetic construct
DQAQ

SEQ ID NO: 4745 - protein, 4 aa, synthetic construct
APAQ

SEQ ID NO: 4746 - protein, 4 aa, synthetic construct
AQAK

SEQ ID NO: 4747 - protein, 4 aa, synthetic construct
AQAH

SEQ ID NO: 4748 - protein, 4 aa, synthetic construct
AQEQ

SEQ ID NO: 4749 - protein, 4 aa, synthetic construct
ALAQ

SEQ ID NO: 4750 - protein, 4 aa, synthetic construct
ARAQ

SEQ ID NO: 4751 - protein, 4 aa, synthetic construct
TQAQ

SEQ ID NO: 4752-4753 - skipped (2 entries)

SEQ ID NO: 4754 - protein, 4 aa, synthetic construct
TLNG

SEQ ID NO: 4755 - skipped

SEQ ID NO: 4756 - protein, 4 aa, synthetic construct
SLNG

SEQ ID NO: 4757 - skipped

SEQ ID NO: 4758 - protein, 4 aa, synthetic construct
ALNG

SEQ ID NO: 4759-4761 - skipped (3 entries)

SEQ ID NO: 4762 - protein, 4 aa, synthetic construct
ALDG

SEQ ID NO: 4763 - protein, 4 aa, synthetic construct
PING

SEQ ID NO: 4764 - protein, 4 aa, synthetic construct
PLDG

SEQ ID NO: 4765 - protein, 4 aa, synthetic construct
PLDS

SEQ ID NO: 4766 - protein, 4 aa, synthetic construct
QLNG

SEQ ID NO: 4767 - protein, 4 aa, synthetic construct
SLDG

SEQ ID NO: 4768 - protein, 8 aa, synthetic construct
LDGAVHLY

SEQ ID NO: 4769 - protein, 8 aa, synthetic construct
LNGAVHLY

SEQ ID NO: 4770 - protein, 8 aa, synthetic construct
INGAVHLY

SEQ ID NO: 4771 - protein, 8 aa, synthetic construct
LDSAVHLY

SEQ ID NO: 4772 - protein, 8 aa, synthetic construct
LDSSVHLY

SEQ ID NO: 4773 - protein, 8 aa, synthetic construct
LNGGVHLY

SEQ ID NO: 4774 - protein, 8 aa, synthetic construct
LNGNVHLY

SEQ ID NO: 4775 - protein, 8 aa, synthetic construct
LNGSVHLY

SEQ ID NO: 4776 - protein, 8 aa, synthetic construct
LNGTVHLY

SEQ ID NO: 4777 - protein, 8 aa, synthetic construct
LNGAVHIY

SEQ ID NO: 4778 - protein, 8 aa, synthetic construct
LDGAVHVY

SEQ ID NO: 4779 - protein, 8 aa, synthetic construct
LNGAVHHY

SEQ ID NO: 4780 - protein, 9 aa, synthetic construct
ALDGAVHLY

SEQ ID NO: 4781 - protein, 9 aa, synthetic construct
ALNGAVHLY

SEQ ID NO: 4782 - protein, 9 aa, synthetic construct
PINGAVHLY

SEQ ID NO: 4783 - protein, 9 aa, synthetic construct
PLDGAVHLY

SEQ ID NO: 4784 - protein, 9 aa, synthetic construct
PLDSAVHLY

SEQ ID NO: 4785 - protein, 9 aa, synthetic construct
PLDSSVHLY

SEQ ID NO: 4786 - protein, 9 aa, synthetic construct
PLNGGVHLY

SEQ ID NO: 4787 - protein, 9 aa, synthetic construct
PLNGNVHLY

SEQ ID NO: 4788 - protein, 9 aa, synthetic construct
PLNGSVHLY

SEQ ID NO: 4789 - protein, 9 aa, synthetic construct
PLNGTVHLY

SEQ ID NO: 4790 - protein, 9 aa, synthetic construct
QLNGAVHLY

SEQ ID NO: 4791 - protein, 9 aa, synthetic construct
SLDGAVHLY

SEQ ID NO: 4792 - protein, 9 aa, synthetic construct
SLNGAVHLY

SEQ ID NO: 4793 - protein, 9 aa, synthetic construct
TLNGAVHLY

SEQ ID NO: 4794 - protein, 9 aa, synthetic construct
PLNGAVHIY

SEQ ID NO: 4795 - protein, 9 aa, synthetic construct
PLDGAVHVY

SEQ ID NO: 4796 - protein, 9 aa, synthetic construct
PLNGAVHHY

SEQ ID NO: 4797 - protein, 8 aa, synthetic construct
VHLYAQAQ

SEQ ID NO: 4798 - protein, 8 aa, synthetic construct
VHLYAQPQ

SEQ ID NO: 4799 - protein, 8 aa, synthetic construct
VHLYSQAQ

SEQ ID NO: 4800 - protein, 8 aa, synthetic construct
VHLYAKAQ

SEQ ID NO: 4801 - protein, 8 aa, synthetic construct
VHLYDQAQ

SEQ ID NO: 4802 - protein, 8 aa, synthetic construct
VHIYAQAQ

SEQ ID NO: 4803 - protein, 8 aa, synthetic construct
VHVYAQAQ

SEQ ID NO: 4804 - protein, 8 aa, synthetic construct
VHHYAQAQ

SEQ ID NO: 4805 - protein, 11 aa, synthetic construct
ALDGAVHLYAQ

SEQ ID NO: 4806 - protein, 11 aa, synthetic construct
ALNGAVHLYAQ

SEQ ID NO: 4807 - protein, 11 aa, synthetic construct
PINGAVHLYAQ

SEQ ID NO: 4808 - protein, 11 aa, synthetic construct
PLDGAVHLYAQ

SEQ ID NO: 4809 - protein, 11 aa, synthetic construct
PLDGAVHLYSQ

SEQ ID NO: 4810 - protein, 11 aa, synthetic construct
PLDSAVHLYAQ

SEQ ID NO: 4811 - protein, 11 aa, synthetic construct
PLDSSVHLYAQ

SEQ ID NO: 4812 - protein, 11 aa, synthetic construct
PLNGAVHLYAK

SEQ ID NO: 4813 - protein, 11 aa, synthetic construct
PLNGAVHLYAQ

SEQ ID NO: 4814 - protein, 11 aa, synthetic construct
PLNGAVHLYDQ

SEQ ID NO: 4815 - protein, 11 aa, synthetic construct
PLNGAVHLYSQ

SEQ ID NO: 4816 - protein, 11 aa, synthetic construct
PLNGGVHLYAQ

SEQ ID NO: 4817 - protein, 11 aa, synthetic construct
PLNGNVHLYAQ

SEQ ID NO: 4818 - protein, 11 aa, synthetic construct
PLNGSVHLYAQ

SEQ ID NO: 4819 - protein, 11 aa, synthetic construct
PLNGTVHLYAQ

SEQ ID NO: 4820 - protein, 11 aa, synthetic construct
QLNGAVHLYAQ

SEQ ID NO: 4821 - protein, 11 aa, synthetic construct
SLDGAVHLYAQ

SEQ ID NO: 4822 - protein, 11 aa, synthetic construct
SLNGAVHLYAQ

SEQ ID NO: 4823 - protein, 11 aa, synthetic construct
TLNGAVHLYAQ

SEQ ID NO: 4824 - protein, 11 aa, synthetic construct
PLNGAVHIYAQ

SEQ ID NO: 4825 - protein, 11 aa, synthetic construct
PLDGAVHVYAQ

SEQ ID NO: 4826 - protein, 11 aa, synthetic construct
PLNGAVHHYAQ

SEQ ID NO: 4827 - protein, 13 aa, synthetic construct
ALDGAVHLYAQAQ

SEQ ID NO: 4828 - protein, 13 aa, synthetic construct
ALNGAVHLYAQAQ

SEQ ID NO: 4829 - protein, 13 aa, synthetic construct
PINGAVHLYAQAQ

SEQ ID NO: 4830 - protein, 13 aa, synthetic construct
PLDGAVHLYAQAQ

SEQ ID NO: 4831 - protein, 13 aa, synthetic construct
PLDGAVHLYAQPQ

SEQ ID NO: 4832 - protein, 13 aa, synthetic construct
PLDGAVHLYSQAQ

SEQ ID NO: 4833 - protein, 13 aa, synthetic construct
PLDSAVHLYAQAQ

SEQ ID NO: 4834 - protein, 13 aa, synthetic construct
PLDSSVHLYAQAQ

SEQ ID NO: 4835 - protein, 13 aa, synthetic construct
PLNGAVHLYAKAQ

SEQ ID NO: 4836 - protein, 13 aa, synthetic construct
PLNGAVHLYAQAQ

SEQ ID NO: 4837 - protein, 13 aa, synthetic construct
PLNGAVHLYAQPQ

SEQ ID NO: 4838 - protein, 13 aa, synthetic construct
PLNGAVHLYDQAQ

SEQ ID NO: 4839 - protein, 13 aa, synthetic construct
PLNGAVHLYSQAQ

SEQ ID NO: 4840 - protein, 13 aa, synthetic construct
PLNGGVHLYAQAQ

SEQ ID NO: 4841 - protein, 13 aa, synthetic construct
PLNGNVHLYAQAQ

SEQ ID NO: 4842 - protein, 13 aa, synthetic construct
PLNGSVHLYAQAQ

SEQ ID NO: 4843 - protein, 13 aa, synthetic construct
PLNGTVHLYAQAQ

SEQ ID NO: 4844 - protein, 13 aa, synthetic construct
QLNGAVHLYAQAQ

SEQ ID NO: 4845 - protein, 13 aa, synthetic construct
SLDGAVHLYAQAQ

SEQ ID NO: 4846 - protein, 13 aa, synthetic construct
SLNGAVHLYAQAQ

SEQ ID NO: 4847 - protein, 13 aa, synthetic construct
TLNGAVHLYAQAQ

SEQ ID NO: 4848 - protein, 13 aa, synthetic construct
PLNGAVHIYAQAQ

SEQ ID NO: 4849 - protein, 13 aa, synthetic construct
PLDGAVHVYAQAQ

SEQ ID NO: 4850 - protein, 13 aa, synthetic construct
PLNGAVHHYAQAQ

SEQ ID NO: 4851 - protein, 6 aa, synthetic construct
TGWVQN

SEQ ID NO: 4852 - protein, 6 aa, synthetic construct
LAAVQN

SEQ ID NO: 4853 - protein, 6 aa, synthetic construct
LTPVQN

SEQ ID NO: 4854 - protein, 6 aa, synthetic construct
SAPVQN

SEQ ID NO: 4855 - protein, 6 aa, synthetic construct
SSPVQN

SEQ ID NO: 4856 - protein, 6 aa, synthetic construct
TGRVQN

SEQ ID NO: 4857 - protein, 6 aa, synthetic construct
TGWAQN

SEQ ID NO: 4858 - protein, 6 aa, synthetic construct
TGWVQS

SEQ ID NO: 4859 - protein, 6 aa, synthetic construct
TLAVQN

SEQ ID NO: 4860 - protein, 6 aa, synthetic construct
TTSVQN

SEQ ID NO: 4861 - protein, 6 aa, synthetic construct
TSPVQN

SEQ ID NO: 4862 - protein, 6 aa, synthetic construct
TALVQN

SEQ ID NO: 4863 - protein, 6 aa, synthetic construct
TAWVQN

SEQ ID NO: 4864 - protein, 6 aa, synthetic construct
TGGVQN

SEQ ID NO: 4865 - protein, 6 aa, synthetic construct
TGSVQN

SEQ ID NO: 4866 - protein, 6 aa, synthetic construct
TGWDQN

SEQ ID NO: 4867 - protein, 6 aa, synthetic construct
TVSVQN

SEQ ID NO: 4868 - protein, 6 aa, synthetic construct
VSPVQN

SEQ ID NO: 4869 - protein, 6 aa, synthetic construct
VSSVQN

SEQ ID NO: 4870 - protein, 6 aa, synthetic construct
AAPVQN

SEQ ID NO: 4871 - protein, 6 aa, synthetic construct
AGPVQN

SEQ ID NO: 4872 - protein, 6 aa, synthetic construct
ASPVQN

SEQ ID NO: 4873 - protein, 6 aa, synthetic construct
ATPVQN

SEQ ID NO: 4874 - protein, 6 aa, synthetic construct
CSPVQN

SEQ ID NO: 4875 - protein, 6 aa, synthetic construct
CTPVQN

SEQ ID NO: 4876 - protein, 6 aa, synthetic construct
IAAVQN

SEQ ID NO: 4877 - protein, 6 aa, synthetic construct
IAGVQN

SEQ ID NO: 4878 - protein, 6 aa, synthetic construct
IASVQN

SEQ ID NO: 4879 - protein, 6 aa, synthetic construct
IGGVQN

SEQ ID NO: 4880 - protein, 6 aa, synthetic construct
IGSVQN

SEQ ID NO: 4881 - protein, 6 aa, synthetic construct
ILGVQN

SEQ ID NO: 4882 - protein, 6 aa, synthetic construct
IQPVQN

SEQ ID NO: 4883 - protein, 6 aa, synthetic construct
IQSVQN

SEQ ID NO: 4884 - protein, 6 aa, synthetic construct
ISGVQN

SEQ ID NO: 4885 - protein, 6 aa, synthetic construct
ISPVQN

SEQ ID NO: 4886 - protein, 6 aa, synthetic construct
ISSVQN

SEQ ID NO: 4887 - protein, 6 aa, synthetic construct
ITPVQN

SEQ ID NO: 4888 - protein, 6 aa, synthetic construct
LAGVQN

SEQ ID NO: 4889 - protein, 6 aa, synthetic construct
LAHVQN

SEQ ID NO: 4890 - protein, 6 aa, synthetic construct
LANVQN

SEQ ID NO: 4891 - protein, 6 aa, synthetic construct
LAPVQN

SEQ ID NO: 4892 - protein, 6 aa, synthetic construct
LAPVQT

SEQ ID NO: 4893 - protein, 6 aa, synthetic construct
LAQVQN

SEQ ID NO: 4894 - protein, 6 aa, synthetic construct
LARVQN

SEQ ID NO: 4895 - protein, 6 aa, synthetic construct
LASVQN

SEQ ID NO: 4896 - protein, 6 aa, synthetic construct
LATVQN

SEQ ID NO: 4897 - protein, 6 aa, synthetic construct
LGPVQN

SEQ ID NO: 4898 - protein, 6 aa, synthetic construct
LGQVQN

SEQ ID NO: 4899 - protein, 6 aa, synthetic construct
LGSVQN

SEQ ID NO: 4900 - protein, 6 aa, synthetic construct
LHPVQN

SEQ ID NO: 4901 - protein, 6 aa, synthetic construct
LKSVQN

SEQ ID NO: 4902 - protein, 6 aa, synthetic construct
LMAVQN

SEQ ID NO: 4903 - protein, 6 aa, synthetic construct
LMGVQN

SEQ ID NO: 4904 - protein, 6 aa, synthetic construct
LMPVQN

SEQ ID NO: 4905 - protein, 6 aa, synthetic construct
LMQVQN

SEQ ID NO: 4906 - protein, 6 aa, synthetic construct
LMSVQN

SEQ ID NO: 4907 - protein, 6 aa, synthetic construct
LNPVQN

SEQ ID NO: 4908 - protein, 6 aa, synthetic construct
LQPVQN

SEQ ID NO: 4909 - protein, 6 aa, synthetic construct
LQQVQN

SEQ ID NO: 4910 - protein, 6 aa, synthetic construct
LQRVQN

SEQ ID NO: 4911 - protein, 6 aa, synthetic construct
LSHVQN

SEQ ID NO: 4912 - protein, 6 aa, synthetic construct
LSKVQN

SEQ ID NO: 4913 - protein, 6 aa, synthetic construct
LSPVQK

SEQ ID NO: 4914 - protein, 6 aa, synthetic construct
LSPVQN

SEQ ID NO: 4915 - protein, 6 aa, synthetic construct
LSQVQN

SEQ ID NO: 4916 - protein, 6 aa, synthetic construct
LSRVQN

SEQ ID NO: 4917 - protein, 6 aa, synthetic construct
LSTVQN

SEQ ID NO: 4918 - protein, 6 aa, synthetic construct
LTAVQN

SEQ ID NO: 4919 - protein, 6 aa, synthetic construct
LTNVQN

SEQ ID NO: 4920 - protein, 6 aa, synthetic construct
LTSVQN

SEQ ID NO: 4921 - protein, 6 aa, synthetic construct
MAPVQN

SEQ ID NO: 4922 - protein, 6 aa, synthetic construct
NAQVQN

SEQ ID NO: 4923 - protein, 6 aa, synthetic construct
NASVQN

SEQ ID NO: 4924 - protein, 6 aa, synthetic construct
NMQVQN

SEQ ID NO: 4925 - protein, 6 aa, synthetic construct
NSPVQN

SEQ ID NO: 4926 - protein, 6 aa, synthetic construct
NTPVQN

SEQ ID NO: 4927 - protein, 6 aa, synthetic construct
NVQVQN

SEQ ID NO: 4928 - protein, 6 aa, synthetic construct
QAPVQN

SEQ ID NO: 4929 - protein, 6 aa, synthetic construct
RAAVQN

SEQ ID NO: 4930 - protein, 6 aa, synthetic construct
RAQVQN

SEQ ID NO: 4931 - protein, 6 aa, synthetic construct
RASVQN

SEQ ID NO: 4932 - protein, 6 aa, synthetic construct
RGGVQN

SEQ ID NO: 4933 - protein, 6 aa, synthetic construct
RGSVQN

SEQ ID NO: 4934 - protein, 6 aa, synthetic construct
RIAVQN

SEQ ID NO: 4935 - protein, 6 aa, synthetic construct
RIGVQN

SEQ ID NO: 4936 - protein, 6 aa, synthetic construct
RIPVQN

SEQ ID NO: 4937 - protein, 6 aa, synthetic construct
RLGVQN

SEQ ID NO: 4938 - protein, 6 aa, synthetic construct
RLSVQN

SEQ ID NO: 4939 - protein, 6 aa, synthetic construct
RMSVQN

SEQ ID NO: 4940 - protein, 6 aa, synthetic construct
RNSVQN

SEQ ID NO: 4941 - protein, 6 aa, synthetic construct
RQPVQN

SEQ ID NO: 4942 - protein, 6 aa, synthetic construct
RSAVQN

SEQ ID NO: 4943 - protein, 6 aa, synthetic construct
RSGVQN

SEQ ID NO: 4944 - protein, 6 aa, synthetic construct
RSPVQN

SEQ ID NO: 4945 - protein, 6 aa, synthetic construct
RSQVQN

SEQ ID NO: 4946 - protein, 6 aa, synthetic construct
RSSVQN

SEQ ID NO: 4947 - protein, 6 aa, synthetic construct
RSTVQN

SEQ ID NO: 4948 - protein, 6 aa, synthetic construct
RTAVQN

SEQ ID NO: 4949 - protein, 6 aa, synthetic construct
RTGVQN

SEQ ID NO: 4950 - protein, 6 aa, synthetic construct
RTLVQN

SEQ ID NO: 4951 - protein, 6 aa, synthetic construct
RTSVQN

SEQ ID NO: 4952 - protein, 6 aa, synthetic construct
RTTVQN

SEQ ID NO: 4953 - protein, 6 aa, synthetic construct
RVEVQN

SEQ ID NO: 4954 - protein, 6 aa, synthetic construct
SAAVQN

SEQ ID NO: 4955 - protein, 6 aa, synthetic construct
SAKVQN

SEQ ID NO: 4956 - protein, 6 aa, synthetic construct
SAMVQN

SEQ ID NO: 4957 - protein, 6 aa, synthetic construct
SAQVQN

SEQ ID NO: 4958 - protein, 6 aa, synthetic construct
SGPVQN

SEQ ID NO: 4959 - protein, 6 aa, synthetic construct
SMAVQN

SEQ ID NO: 4960 - protein, 6 aa, synthetic construct
SMGVQN

SEQ ID NO: 4961 - protein, 6 aa, synthetic construct
SMQVQN

SEQ ID NO: 4962 - protein, 6 aa, synthetic construct
SMSVQN

SEQ ID NO: 4963 - protein, 6 aa, synthetic construct
STPVQN

SEQ ID NO: 4964 - protein, 6 aa, synthetic construct
SVAVQN

SEQ ID NO: 4965 - protein, 6 aa, synthetic construct
SVGVQN

SEQ ID NO: 4966 - protein, 6 aa, synthetic construct
TAAVQN

SEQ ID NO: 4967 - protein, 6 aa, synthetic construct
TAGVQN

SEQ ID NO: 4968 - protein, 6 aa, synthetic construct
TAKVQN

SEQ ID NO: 4969 - protein, 6 aa, synthetic construct
TAMVQN

SEQ ID NO: 4970 - protein, 6 aa, synthetic construct
TANVQN

SEQ ID NO: 4971 - protein, 6 aa, synthetic construct
TAPVQN

SEQ ID NO: 4972 - protein, 6 aa, synthetic construct
TAPVQT

SEQ ID NO: 4973 - protein, 6 aa, synthetic construct
TAQVQN

SEQ ID NO: 4974 - protein, 6 aa, synthetic construct
TASVQN

SEQ ID NO: 4975 - protein, 6 aa, synthetic construct
TASVQT

SEQ ID NO: 4976 - protein, 6 aa, synthetic construct
TATVQN

SEQ ID NO: 4977 - protein, 6 aa, synthetic construct
TAVVQN

SEQ ID NO: 4978 - protein, 6 aa, synthetic construct
TAWDQN

SEQ ID NO: 4979 - protein, 6 aa, synthetic construct
TAWVQH

SEQ ID NO: 4980 - protein, 6 aa, synthetic construct
TAWVQT

SEQ ID NO: 4981 - protein, 6 aa, synthetic construct
TGAVQN

SEQ ID NO: 4982 - protein, 6 aa, synthetic construct
TGCFQN

SEQ ID NO: 4983 - protein, 6 aa, synthetic construct
TGGAQN

SEQ ID NO: 4984 - protein, 6 aa, synthetic construct
TGGFQN

SEQ ID NO: 4985 - protein, 6 aa, synthetic construct
TGGVLN

SEQ ID NO: 4986 - protein, 6 aa, synthetic construct
TGGVQH

SEQ ID NO: 4987 - protein, 6 aa, synthetic construct
TGGVQK

SEQ ID NO: 4988 - protein, 6 aa, synthetic construct
TGGVQT

SEQ ID NO: 4989 - protein, 6 aa, synthetic construct
TGPVQN

SEQ ID NO: 4990 - protein, 6 aa, synthetic construct
TGSAQN

SEQ ID NO: 4991 - protein, 6 aa, synthetic construct
TGSLQN

SEQ ID NO: 4992 - protein, 6 aa, synthetic construct
TGSVQH

SEQ ID NO: 4993 - protein, 6 aa, synthetic construct
TGSVQI

SEQ ID NO: 4994 - protein, 6 aa, synthetic construct
TGSVQS

SEQ ID NO: 4995 - protein, 6 aa, synthetic construct
TGSVQT

SEQ ID NO: 4996 - protein, 6 aa, synthetic construct
TGTVQN

SEQ ID NO: 4997 - protein, 6 aa, synthetic construct
TGWEQN

SEQ ID NO: 4998 - protein, 6 aa, synthetic construct
TGWFQN

SEQ ID NO: 4999 - protein, 6 aa, synthetic construct
TGWGQT

SEQ ID NO: 5000 - protein, 6 aa, synthetic construct
TGWVPN

SEQ ID NO: 5001 - protein, 6 aa, synthetic construct
TGWVQD

SEQ ID NO: 5002 - protein, 6 aa, synthetic construct
TGWVQP

SEQ ID NO: 5003 - protein, 6 aa, synthetic construct
TGWVQT

SEQ ID NO: 5004 - protein, 6 aa, synthetic construct
TGWVRN

SEQ ID NO: 5005 - protein, 6 aa, synthetic construct
TKAVQN

SEQ ID NO: 5006 - protein, 6 aa, synthetic construct
TKPVQN

SEQ ID NO: 5007 - protein, 6 aa, synthetic construct
TKQVQN

SEQ ID NO: 5008 - protein, 6 aa, synthetic construct
TKSVQN

SEQ ID NO: 5009 - protein, 6 aa, synthetic construct
TLPVQN

SEQ ID NO: 5010 - protein, 6 aa, synthetic construct
TLQVQN

SEQ ID NO: 5011 - protein, 6 aa, synthetic construct
TMAVQN

SEQ ID NO: 5012 - protein, 6 aa, synthetic construct
TMGVQN

SEQ ID NO: 5013 - protein, 6 aa, synthetic construct
TMKVQN

SEQ ID NO: 5014 - protein, 6 aa, synthetic construct
TMNVQN

SEQ ID NO: 5015 - protein, 6 aa, synthetic construct
TMPVQN

SEQ ID NO: 5016 - protein, 6 aa, synthetic construct
TMQVQN

SEQ ID NO: 5017 - protein, 6 aa, synthetic construct
TMSVKN

SEQ ID NO: 5018 - protein, 6 aa, synthetic construct
TMSVQN

SEQ ID NO: 5019 - protein, 6 aa, synthetic construct
TMSVQT

SEQ ID NO: 5020 - protein, 6 aa, synthetic construct
TMTVQN

SEQ ID NO: 5021 - protein, 6 aa, synthetic construct
TNAVQN

SEQ ID NO: 5022 - protein, 6 aa, synthetic construct
TNQVQN

SEQ ID NO: 5023 - protein, 6 aa, synthetic construct
TNSVQN

SEQ ID NO: 5024 - protein, 6 aa, synthetic construct
TPPVQN

SEQ ID NO: 5025 - protein, 6 aa, synthetic construct
TQHVQN

SEQ ID NO: 5026 - protein, 6 aa, synthetic construct
TQKVQN

SEQ ID NO: 5027 - protein, 6 aa, synthetic construct
TQMVQN

SEQ ID NO: 5028 - protein, 6 aa, synthetic construct
TQNVQN

SEQ ID NO: 5029 - protein, 6 aa, synthetic construct
TQPVQN

SEQ ID NO: 5030 - protein, 6 aa, synthetic construct
TQQVQN

SEQ ID NO: 5031 - protein, 6 aa, synthetic construct
TQTVQN

SEQ ID NO: 5032 - protein, 6 aa, synthetic construct
TRWDQN

SEQ ID NO: 5033 - protein, 6 aa, synthetic construct
TSAVQN

SEQ ID NO: 5034 - protein, 6 aa, synthetic construct
TSGVQN

SEQ ID NO: 5035 - protein, 6 aa, synthetic construct
TSHVQN

SEQ ID NO: 5036 - protein, 6 aa, synthetic construct
TSKVQN

SEQ ID NO: 5037 - protein, 6 aa, synthetic construct
TSLVQN

SEQ ID NO: 5038 - protein, 6 aa, synthetic construct
TSMVQN

SEQ ID NO: 5039 - protein, 6 aa, synthetic construct
TSPDQN

SEQ ID NO: 5040 - protein, 6 aa, synthetic construct
TSQVQN

SEQ ID NO: 5041 - protein, 6 aa, synthetic construct
TSSVQN

SEQ ID NO: 5042 - protein, 6 aa, synthetic construct
TSSVQT

SEQ ID NO: 5043 - protein, 6 aa, synthetic construct
TSTVQN

SEQ ID NO: 5044 - protein, 6 aa, synthetic construct
TSVVQN

SEQ ID NO: 5045 - protein, 6 aa, synthetic construct
TTAVQN

SEQ ID NO: 5046 - protein, 6 aa, synthetic construct
TTGVQN

SEQ ID NO: 5047 - protein, 6 aa, synthetic construct
TTKVQN

SEQ ID NO: 5048 - protein, 6 aa, synthetic construct
TTPVQN

SEQ ID NO: 5049 - protein, 6 aa, synthetic construct
TTPVQT

SEQ ID NO: 5050 - protein, 6 aa, synthetic construct
TTQVQN

SEQ ID NO: 5051 - protein, 6 aa, synthetic construct
TTTVQN

SEQ ID NO: 5052 - protein, 6 aa, synthetic construct
TVAVQN

SEQ ID NO: 5053 - protein, 6 aa, synthetic construct
TVAVQT

SEQ ID NO: 5054 - protein, 6 aa, synthetic construct
TVGVQN

SEQ ID NO: 5055 - protein, 6 aa, synthetic construct
TVQVQN

SEQ ID NO: 5056 - protein, 6 aa, synthetic construct
TVSVKN

SEQ ID NO: 5057 - protein, 6 aa, synthetic construct
TVWVQK

SEQ ID NO: 5058 - protein, 6 aa, synthetic construct
VAAVQN

SEQ ID NO: 5059 - protein, 6 aa, synthetic construct
VAGVQN

SEQ ID NO: 5060 - protein, 6 aa, synthetic construct
VAKVQN

SEQ ID NO: 5061 - protein, 6 aa, synthetic construct
VANVQN

SEQ ID NO: 5062 - protein, 6 aa, synthetic construct
VAQVQN

SEQ ID NO: 5063 - protein, 6 aa, synthetic construct
VASVQN

SEQ ID NO: 5064 - protein, 6 aa, synthetic construct
VATVQN

SEQ ID NO: 5065 - protein, 6 aa, synthetic construct
VGGVQN

SEQ ID NO: 5066 - protein, 6 aa, synthetic construct
VGKVQN

SEQ ID NO: 5067 - protein, 6 aa, synthetic construct
VGNVQN

SEQ ID NO: 5068 - protein, 6 aa, synthetic construct
VGSVQN

SEQ ID NO: 5069 - protein, 6 aa, synthetic construct
VHPVQN

SEQ ID NO: 5070 - protein, 6 aa, synthetic construct
VKAVQN

SEQ ID NO: 5071 - protein, 6 aa, synthetic construct
VKPVQN

SEQ ID NO: 5072 - protein, 6 aa, synthetic construct
VKQVQN

SEQ ID NO: 5073 - protein, 6 aa, synthetic construct
VLPVQN

SEQ ID NO: 5074 - protein, 6 aa, synthetic construct
VLSVQN

SEQ ID NO: 5075 - protein, 6 aa, synthetic construct
VMAVQN

SEQ ID NO: 5076 - protein, 6 aa, synthetic construct
VMQVQN

SEQ ID NO: 5077 - protein, 6 aa, synthetic construct
VMSVQN

SEQ ID NO: 5078 - protein, 6 aa, synthetic construct
VNAVQN

SEQ ID NO: 5079 - protein, 6 aa, synthetic construct
VNGVQN

SEQ ID NO: 5080 - protein, 6 aa, synthetic construct
VNSVQN

SEQ ID NO: 5081 - protein, 6 aa, synthetic construct
VQAVQN

SEQ ID NO: 5082 - protein, 6 aa, synthetic construct
VQNVQN

SEQ ID NO: 5083 - protein, 6 aa, synthetic construct
VQPVQN

SEQ ID NO: 5084 - protein, 6 aa, synthetic construct
VQQVQN

SEQ ID NO: 5085 - protein, 6 aa, synthetic construct
VQSVQN

SEQ ID NO: 5086 - protein, 6 aa, synthetic construct
VQTVQN

SEQ ID NO: 5087 - protein, 6 aa, synthetic construct
VRPVQN

SEQ ID NO: 5088 - protein, 6 aa, synthetic construct
VSAVQN

SEQ ID NO: 5089 - protein, 6 aa, synthetic construct
VSGVQN

SEQ ID NO: 5090 - protein, 6 aa, synthetic construct
VSNVQN

SEQ ID NO: 5091 - protein, 6 aa, synthetic construct
VSPVQT

SEQ ID NO: 5092 - protein, 6 aa, synthetic construct
VSQVQN

SEQ ID NO: 5093 - protein, 6 aa, synthetic construct
VSRVQN

SEQ ID NO: 5094 - protein, 6 aa, synthetic construct
VSSVQK

SEQ ID NO: 5095 - protein, 6 aa, synthetic construct
VSSVQT

SEQ ID NO: 5096 - protein, 6 aa, synthetic construct
VSTVQN

SEQ ID NO: 5097 - protein, 6 aa, synthetic construct
VTAVQN

SEQ ID NO: 5098 - protein, 6 aa, synthetic construct
VTGVQN

SEQ ID NO: 5099 - protein, 6 aa, synthetic construct
VTKVQN

SEQ ID NO: 5100 - protein, 6 aa, synthetic construct
VTPVQN

SEQ ID NO: 5101 - protein, 6 aa, synthetic construct
VTSVQN

SEQ ID NO: 5102 - protein, 6 aa, synthetic construct
TGLVQN

SEQ ID NO: 5103 - protein, 6 aa, synthetic construct
TGWVKN

SEQ ID NO: 5104 - protein, 6 aa, synthetic construct
PGWVQN

SEQ ID NO: 5105 - protein, 6 aa, synthetic construct
TGWVQH

SEQ ID NO: 5106 - protein, 6 aa, synthetic construct
LSGVQN

SEQ ID NO: 5107 - protein, 6 aa, synthetic construct
LSSVQN

SEQ ID NO: 5108 - protein, 6 aa, synthetic construct
LVPVQN

SEQ ID NO: 5109 - protein, 6 aa, synthetic construct
LSPVKN

SEQ ID NO: 5110 - protein, 7 aa, synthetic construct
PLNGAVN

SEQ ID NO: 5111 - protein, 7 aa, synthetic construct
PLNGAVQ

SEQ ID NO: 5112 - protein, 7 aa, synthetic construct
PLNGAIH

SEQ ID NO: 5113 - protein, 7 aa, synthetic construct
PLNGALH

SEQ ID NO: 5114 - protein, 7 aa, synthetic construct
PLNGAVP

SEQ ID NO: 5115 - protein, 7 aa, synthetic construct
PLNGAVD

SEQ ID NO: 5116 - protein, 7 aa, synthetic construct
PLNGAAH

SEQ ID NO: 5117 - protein, 7 aa, synthetic construct
PLNGAFH

SEQ ID NO: 5118 - protein, 7 aa, synthetic construct
PLNGADH

SEQ ID NO: 5119 - protein, 7 aa, synthetic construct
PLNGAVL

SEQ ID NO: 5120 - protein, 7 aa, synthetic construct
PLNGAGH

SEQ ID NO: 5121 - protein, 7 aa, synthetic construct
PLNGAVR

SEQ ID NO: 5122 - protein, 7 aa, synthetic construct
PLNGAVY

SEQ ID NO: 5123 - protein, 9 aa, synthetic construct
PLNGAVNLY

SEQ ID NO: 5124 - protein, 9 aa, synthetic construct
PLNGAVQLY

SEQ ID NO: 5125 - protein, 9 aa, synthetic construct
PLNGAIHLY

SEQ ID NO: 5126 - protein, 9 aa, synthetic construct
PLNGALHLY

SEQ ID NO: 5127 - protein, 9 aa, synthetic construct
PLNGAVPLY

SEQ ID NO: 5128 - protein, 9 aa, synthetic construct
PLNGAVDLY

SEQ ID NO: 5129 - protein, 9 aa, synthetic construct
PLNGAAHLY

SEQ ID NO: 5130 - protein, 9 aa, synthetic construct
PLNGAVHRY

SEQ ID NO: 5131 - protein, 9 aa, synthetic construct
PLNGAFHLY

SEQ ID NO: 5132 - protein, 9 aa, synthetic construct
PLNGADHLY

SEQ ID NO: 5133 - protein, 9 aa, synthetic construct
PLNGAVLLY

SEQ ID NO: 5134 - protein, 9 aa, synthetic construct
PLNGAGHLY

SEQ ID NO: 5135 - protein, 9 aa, synthetic construct
PLNGAVRLY

SEQ ID NO: 5136 - protein, 9 aa, synthetic construct
PLNGAVHVY

SEQ ID NO: 5137 - protein, 9 aa, synthetic construct
PLNGAVYLY

SEQ ID NO: 5138 - protein, 8 aa, synthetic construct
VHLYAHAQ

SEQ ID NO: 5139 - protein, 8 aa, synthetic construct
VNLYAQAQ

SEQ ID NO: 5140 - protein, 8 aa, synthetic construct
VQLYAQAQ

SEQ ID NO: 5141 - protein, 8 aa, synthetic construct
VHLYAQEQ

SEQ ID NO: 5142 - protein, 8 aa, synthetic construct
IHLYAQAQ

SEQ ID NO: 5143 - protein, 8 aa, synthetic construct
LHLYAQAQ

SEQ ID NO: 5144 - protein, 8 aa, synthetic construct
VPLYAQAQ

SEQ ID NO: 5145 - protein, 8 aa, synthetic construct
VHLYAQAK

SEQ ID NO: 5146 - protein, 8 aa, synthetic construct
VDLYAQAQ

SEQ ID NO: 5147 - protein, 8 aa, synthetic construct
AHLYAQAQ

SEQ ID NO: 5148 - protein, 8 aa, synthetic construct
VHRYAQAQ

SEQ ID NO: 5149 - protein, 8 aa, synthetic construct
FHLYAQAQ

SEQ ID NO: 5150 - protein, 8 aa, synthetic construct
VHLYALAQ

SEQ ID NO: 5151 - protein, 8 aa, synthetic construct
DHLYAQAQ

SEQ ID NO: 5152 - protein, 8 aa, synthetic construct
VHLYAPAQ

SEQ ID NO: 5153 - protein, 8 aa, synthetic construct
VHLYARAQ

SEQ ID NO: 5154 - protein, 8 aa, synthetic construct
VHLYAQAH

SEQ ID NO: 5155 - protein, 8 aa, synthetic construct
VLLYAQAQ

SEQ ID NO: 5156 - protein, 8 aa, synthetic construct
VHLYAQAP

SEQ ID NO: 5157 - protein, 8 aa, synthetic construct
GHLYAQAQ

SEQ ID NO: 5158 - protein, 8 aa, synthetic construct
VRLYAQAQ

SEQ ID NO: 5159 - protein, 8 aa, synthetic construct
VYLYAQAQ

SEQ ID NO: 5160 - protein, 8 aa, synthetic construct
VHLYTQAQ

SEQ ID NO: 5161 - protein, 11 aa, synthetic construct
PLNGAVHLYAH

SEQ ID NO: 5162 - protein, 11 aa, synthetic construct
PLNGAVNLYAQ

SEQ ID NO: 5163 - protein, 11 aa, synthetic construct
PLNGAVQLYAQ

SEQ ID NO: 5164 - protein, 11 aa, synthetic construct
PLNGAIHLYAQ

SEQ ID NO: 5165 - protein, 11 aa, synthetic construct
PLNGALHLYAQ

SEQ ID NO: 5166 - protein, 11 aa, synthetic construct
PLNGAVPLYAQ

SEQ ID NO: 5167 - protein, 11 aa, synthetic construct
PLNGAVDLYAQ

SEQ ID NO: 5168 - protein, 11 aa, synthetic construct
PLNGAAHLYAQ

SEQ ID NO: 5169 - protein, 11 aa, synthetic construct
PLNGAVHRYAQ

SEQ ID NO: 5170 - protein, 11 aa, synthetic construct
PLNGAFHLYAQ

SEQ ID NO: 5171 - protein, 11 aa, synthetic construct
PLNGAVHLYAL

SEQ ID NO: 5172 - protein, 11 aa, synthetic construct
PLNGADHLYAQ

SEQ ID NO: 5173 - protein, 11 aa, synthetic construct
PLNGAVHLYAP

SEQ ID NO: 5174 - protein, 11 aa, synthetic construct
PLNGAVHLYAR

SEQ ID NO: 5175 - protein, 11 aa, synthetic construct
PLNGAVLLYAQ

SEQ ID NO: 5176 - protein, 11 aa, synthetic construct
PLNGAGHLYAQ

SEQ ID NO: 5177 - protein, 11 aa, synthetic construct
PLNGAVRLYAQ

SEQ ID NO: 5178 - protein, 11 aa, synthetic construct
PLNGAVHVYAQ

SEQ ID NO: 5179 - protein, 11 aa, synthetic construct
PLNGAVYLYAQ

SEQ ID NO: 5180 - protein, 11 aa, synthetic construct
PLNGAVHLYTQ

SEQ ID NO: 5181 - protein, 13 aa, synthetic construct
PLNGAVHLYAHAQ

SEQ ID NO: 5182 - protein, 13 aa, synthetic construct
PLNGAVNLYAQAQ

SEQ ID NO: 5183 - protein, 13 aa, synthetic construct
PLNGAVQLYAQAQ

SEQ ID NO: 5184 - protein, 13 aa, synthetic construct
PLNGAVHLYAQEQ

SEQ ID NO: 5185 - protein, 13 aa, synthetic construct
PLNGAIHLYAQAQ

SEQ ID NO: 5186 - protein, 13 aa, synthetic construct
PLNGALHLYAQAQ

SEQ ID NO: 5187 - protein, 13 aa, synthetic construct
PLNGAVPLYAQAQ

SEQ ID NO: 5188 - protein, 13 aa, synthetic construct
PLNGAVHLYAQAK

SEQ ID NO: 5189 - protein, 13 aa, synthetic construct
PLNGAVDLYAQAQ

SEQ ID NO: 5190 - protein, 13 aa, synthetic construct
PLNGAAHLYAQAQ

SEQ ID NO: 5191 - protein, 13 aa, synthetic construct
PLNGAVHRYAQAQ

SEQ ID NO: 5192 - protein, 13 aa, synthetic construct
PLNGAFHLYAQAQ

SEQ ID NO: 5193 - protein, 13 aa, synthetic construct
PLNGAVHLYALAQ

SEQ ID NO: 5194 - protein, 13 aa, synthetic construct
PLNGADHLYAQAQ

SEQ ID NO: 5195 - protein, 13 aa, synthetic construct
PLNGAVHLYAPAQ

SEQ ID NO: 5196 - protein, 13 aa, synthetic construct
PLNGAVHLYARAQ

SEQ ID NO: 5197 - protein, 13 aa, synthetic construct
PLNGAVHLYAQAH

SEQ ID NO: 5198 - protein, 13 aa, synthetic construct
PLNGAVLLYAQAQ

SEQ ID NO: 5199 - protein, 13 aa, synthetic construct
PLNGAVHLYAQAP

SEQ ID NO: 5200 - protein, 13 aa, synthetic construct
PLNGAGHLYAQAQ

SEQ ID NO: 5201 - protein, 13 aa, synthetic construct
PLNGAVRLYAQAQ

SEQ ID NO: 5202 - protein, 13 aa, synthetic construct
PLNGAVHVYAQAQ

SEQ ID NO: 5203 - protein, 13 aa, synthetic construct
PLNGAVYLYAQAQ

SEQ ID NO: 5204 - protein, 13 aa, synthetic construct
PLNGAVHLYTQAQ

SEQ ID NO: 5205 - protein, 6 aa, synthetic construct
TMMVQN

SEQ ID NO: 5206 - protein, 6 aa, synthetic construct
TGGVQS

SEQ ID NO: 5207 - protein, 6 aa, synthetic construct
TGSFQN

SEQ ID NO: 5208 - protein, 6 aa, synthetic construct
RSVVQN

SEQ ID NO: 5209 - protein, 6 aa, synthetic construct
TGSVQK

SEQ ID NO: 5210 - protein, 6 aa, synthetic construct
TQLVQN

SEQ ID NO: 5211 - protein, 6 aa, synthetic construct
TGGVHN

SEQ ID NO: 5212 - protein, 6 aa, synthetic construct
RTPVQN

SEQ ID NO: 5213 - protein, 6 aa, synthetic construct
RQQVQN

SEQ ID NO: 5214 - protein, 6 aa, synthetic construct
TGSVRN

SEQ ID NO: 5215 - protein, 6 aa, synthetic construct
VQGVQN

SEQ ID NO: 5216 - protein, 6 aa, synthetic construct
PGWVQT

SEQ ID NO: 5217 - protein, 6 aa, synthetic construct
STQVQN

SEQ ID NO: 5218 - protein, 6 aa, synthetic construct
QSPVQN

SEQ ID NO: 5219 - protein, 6 aa, synthetic construct
RYSVQN

SEQ ID NO: 5220 - protein, 6 aa, synthetic construct
TQRVQN

SEQ ID NO: 5221 - protein, 6 aa, synthetic construct
SAGVQN

SEQ ID NO: 5222 - protein, 6 aa, synthetic construct
SAPVQT

SEQ ID NO: 5223 - protein, 6 aa, synthetic construct
RQSVQN

SEQ ID NO: 5224 - protein, 6 aa, synthetic construct
SQPVQN

SEQ ID NO: 5225 - protein, 6 aa, synthetic construct
VASVKN

SEQ ID NO: 5226 - protein, 6 aa, synthetic construct
TAWVRN

SEQ ID NO: 5227 - protein, 6 aa, synthetic construct
TGGGQN

SEQ ID NO: 5228 - protein, 6 aa, synthetic construct
STSVQN

SEQ ID NO: 5229 - protein, 6 aa, synthetic construct
VLGVQN

SEQ ID NO: 5230 - protein, 6 aa, synthetic construct
NQPVQN

SEQ ID NO: 5231 - protein, 6 aa, synthetic construct
LGTVQN

SEQ ID NO: 5232 - protein, 6 aa, synthetic construct
RAGVQN

SEQ ID NO: 5233 - protein, 6 aa, synthetic construct
TGGVKN

SEQ ID NO: 5234 - protein, 6 aa, synthetic construct
TAWLQN

SEQ ID NO: 5235 - protein, 6 aa, synthetic construct
TRWVQK

SEQ ID NO: 5236 - protein, 6 aa, synthetic construct
LAPVKN

SEQ ID NO: 5237 - protein, 6 aa, synthetic construct
TGSVQD

SEQ ID NO: 5238 - protein, 6 aa, synthetic construct
TGMVQN

SEQ ID NO: 5239 - protein, 6 aa, synthetic construct
LSNVQN

SEQ ID NO: 5240 - protein, 6 aa, synthetic construct
RLPVQN

SEQ ID NO: 5241 - protein, 6 aa, synthetic construct
RQGVQN

SEQ ID NO: 5242 - protein, 6 aa, synthetic construct
STPVQT

SEQ ID NO: 5243 - protein, 6 aa, synthetic construct
TTPVKN

SEQ ID NO: 5244 - protein, 6 aa, synthetic construct
RLTVQN

SEQ ID NO: 5245 - protein, 6 aa, synthetic construct
TLRVQN

SEQ ID NO: 5246 - protein, 6 aa, synthetic construct
SAFVQN

SEQ ID NO: 5247 - protein, 6 aa, synthetic construct
SVQVQN

SEQ ID NO: 5248 - protein, 6 aa, synthetic construct
LLPVQN

SEQ ID NO: 5249 - protein, 6 aa, synthetic construct
RTQVQN

SEQ ID NO: 5250 - protein, 6 aa, synthetic construct
TGSDQN

SEQ ID NO: 5251 - protein, 6 aa, synthetic construct
VASDQN

SEQ ID NO: 5252 - protein, 6 aa, synthetic construct
VSPVKN

SEQ ID NO: 5253 - protein, 6 aa, synthetic construct
LPPVQN

SEQ ID NO: 5254 - protein, 6 aa, synthetic construct
SSPVQT

SEQ ID NO: 5255 - protein, 6 aa, synthetic construct
AQPVQN

SEQ ID NO: 5256 - protein, 6 aa, synthetic construct
TPQVQN

SEQ ID NO: 5257 - protein, 6 aa, synthetic construct
TSWVQN

SEQ ID NO: 5258 - protein, 6 aa, synthetic construct
TGGDQN

SEQ ID NO: 5259 - protein, 6 aa, synthetic construct
SSPVKN

SEQ ID NO: 5260 - protein, 6 aa, synthetic construct
NTTVQN

SEQ ID NO: 5261 - protein, 6 aa, synthetic construct
TTRVQN

SEQ ID NO: 5262 - protein, 6 aa, synthetic construct
TQWVQN

SEQ ID NO: 5263 - protein, 6 aa, synthetic construct
TGSVHN

SEQ ID NO: 5264 - protein, 6 aa, synthetic construct
TGGLQN

SEQ ID NO: 5265 - protein, 6 aa, synthetic construct
TAWVQK

SEQ ID NO: 5266 - protein, 6 aa, synthetic construct
TGRVQT

SEQ ID NO: 5267 - protein, 6 aa, synthetic construct
NTQVQN

SEQ ID NO: 5268 - protein, 6 aa, synthetic construct
TGWLQN

SEQ ID NO: 5269 - protein, 6 aa, synthetic construct
TYAVQN

SEQ ID NO: 5270 - protein, 6 aa, synthetic construct
TLSVQN

SEQ ID NO: 5271 - protein, 6 aa, synthetic construct
NLPVQN

SEQ ID NO: 5272 - protein, 6 aa, synthetic construct
TSSDQN

SEQ ID NO: 5273 - protein, 6 aa, synthetic construct
ATSVQN

SEQ ID NO: 5274 - protein, 6 aa, synthetic construct
TAWFQN

SEQ ID NO: 5275 - protein, 6 aa, synthetic construct
ATQVQN

SEQ ID NO: 5276 - protein, 6 aa, synthetic construct
VSSVKN

SEQ ID NO: 5277 - protein, 6 aa, synthetic construct
TGSGQN

SEQ ID NO: 5278 - protein, 6 aa, synthetic construct
LQPVQT

SEQ ID NO: 5279 - protein, 6 aa, synthetic construct
VSAVKN

SEQ ID NO: 5280 - protein, 6 aa, synthetic construct
TQAVQN

SEQ ID NO: 5281 - protein, 6 aa, synthetic construct
TGWVQK

SEQ ID NO: 5282 - protein, 6 aa, synthetic construct
VMPVQN

SEQ ID NO: 5283 - protein, 6 aa, synthetic construct
TVSVQK

SEQ ID NO: 5284 - protein, 6 aa, synthetic construct
TAWAQN

SEQ ID NO: 5285 - protein, 6 aa, synthetic construct
NALVQN

SEQ ID NO: 5286 - protein, 6 aa, synthetic construct
RMLVQN

SEQ ID NO: 5287 - protein, 6 aa, synthetic construct
TVAVKN

SEQ ID NO: 5288 - protein, 6 aa, synthetic construct
RQLVQN

SEQ ID NO: 5289 - protein, 6 aa, synthetic construct
TLGVQN

SEQ ID NO: 5290 - protein, 6 aa, synthetic construct
LGPVQT

SEQ ID NO: 5291 - protein, 6 aa, synthetic construct
TGSVKN

SEQ ID NO: 5292 - protein, 6 aa, synthetic construct
TMSDQN

SEQ ID NO: 5293 - protein, 6 aa, synthetic construct
LASVKN

SEQ ID NO: 5294 - protein, 6 aa, synthetic construct
TGFVQN

SEQ ID NO: 5295 - protein, 6 aa, synthetic construct
SALVQN

SEQ ID NO: 5296 - protein, 6 aa, synthetic construct
TGWVKT

SEQ ID NO: 5297 - protein, 6 aa, synthetic construct
SQLVQN

SEQ ID NO: 5298 - protein, 6 aa, synthetic construct
TGWGQN

SEQ ID NO: 5299 - protein, 6 aa, synthetic construct
LSAVQN

SEQ ID NO: 5300 - protein, 6 aa, synthetic construct
TMQVQT

SEQ ID NO: 5301 - protein, 6 aa, synthetic construct
TGQVQN

SEQ ID NO: 5302 - protein, 6 aa, synthetic construct
TSPVKN

SEQ ID NO: 5303 - protein, 6 aa, synthetic construct
LSQVQT

SEQ ID NO: 5304 - protein, 6 aa, synthetic construct
TGSVLN

SEQ ID NO: 5305 - protein, 6 aa, synthetic construct
TNGVQN

SEQ ID NO: 5306 - protein, 6 aa, synthetic construct
TGWVKK

SEQ ID NO: 5307 - protein, 6 aa, synthetic construct
AAAVQN

SEQ ID NO: 5308 - protein, 6 aa, synthetic construct
SAVVQN

SEQ ID NO: 5309 - protein, 6 aa, synthetic construct
PGWVQH

SEQ ID NO: 5310 - protein, 6 aa, synthetic construct
TASDQN

SEQ ID NO: 5311 - protein, 6 aa, synthetic construct
SSRVQN

SEQ ID NO: 5312 - protein, 6 aa, synthetic construct
SPPVQN

SEQ ID NO: 5313 - protein, 6 aa, synthetic construct
VQPVQT

SEQ ID NO: 5314 - protein, 6 aa, synthetic construct
TSSVKN

SEQ ID NO: 5315 - protein, 6 aa, synthetic construct
LSPLQN

SEQ ID NO: 5316 - protein, 6 aa, synthetic construct
VSQVQK

SEQ ID NO: 5317 - protein, 6 aa, synthetic construct
LVGVQN

SEQ ID NO: 5318 - protein, 6 aa, synthetic construct
TLSVKN

SEQ ID NO: 5319 - protein, 6 aa, synthetic construct
TGWFQK

SEQ ID NO: 5320 - protein, 6 aa, synthetic construct
TPAVQN

SEQ ID NO: 5321 - protein, 6 aa, synthetic construct
TVGVKN

SEQ ID NO: 5322 - protein, 6 aa, synthetic construct
KGWDQN

SEQ ID NO: 5323 - protein, 6 aa, synthetic construct
TAWVLN

SEQ ID NO: 5324 - protein, 6 aa, synthetic construct
VPPVQN

SEQ ID NO: 5325 - protein, 6 aa, synthetic construct
ATGVQN

SEQ ID NO: 5326 - protein, 6 aa, synthetic construct
TGGVQI

SEQ ID NO: 5327 - protein, 6 aa, synthetic construct
TGWVLN

SEQ ID NO: 5328 - protein, 6 aa, synthetic construct
TAWGQN

SEQ ID NO: 5329 - protein, 6 aa, synthetic construct
TGWVHN

SEQ ID NO: 5330 - protein, 6 aa, synthetic construct
LGSVQT

SEQ ID NO: 5331 - protein, 6 aa, synthetic construct
SANVQN

SEQ ID NO: 5332 - protein, 6 aa, synthetic construct
TGGVQD

SEQ ID NO: 5333 - protein, 6 aa, synthetic construct
TMAVKN

SEQ ID NO: 5334 - protein, 6 aa, synthetic construct
TASVKN

SEQ ID NO: 5335 - protein, 6 aa, synthetic construct
SSPVQK

SEQ ID NO: 5336 - protein, 6 aa, synthetic construct
TGTVQT

SEQ ID NO: 5337 - protein, 6 aa, synthetic construct
TGWVQI

SEQ ID NO: 5338 - protein, 6 aa, synthetic construct
TVWVKN

SEQ ID NO: 5339 - protein, 6 aa, synthetic construct
SQQVQN

SEQ ID NO: 5340 - protein, 6 aa, synthetic construct
VGSVQT

SEQ ID NO: 5341 - protein, 6 aa, synthetic construct
SSMVQN

SEQ ID NO: 5342 - protein, 6 aa, synthetic construct
TSPVQK

SEQ ID NO: 5343 - protein, 6 aa, synthetic construct
AVGVQN

SEQ ID NO: 5344 - protein, 6 aa, synthetic construct
VAPVQN

SEQ ID NO: 5345 - protein, 6 aa, synthetic construct
TLPVQK

SEQ ID NO: 5346 - protein, 6 aa, synthetic construct
TGRVQH

SEQ ID NO: 5347 - protein, 6 aa, synthetic construct
TPSVQN

SEQ ID NO: 5348 - protein, 6 aa, synthetic construct
TGWVEN

SEQ ID NO: 5349 - protein, 6 aa, synthetic construct
RGWVQN

SEQ ID NO: 5350 - protein, 6 aa, synthetic construct
TGSVEN

SEQ ID NO: 5351 - protein, 6 aa, synthetic construct
SSLVQN

SEQ ID NO: 5352 - protein, 6 aa, synthetic construct
TAWVKN

SEQ ID NO: 5353 - protein, 6 aa, synthetic construct
TYSVQN

SEQ ID NO: 5354 - protein, 6 aa, synthetic construct
LAAVQT

SEQ ID NO: 5355 - protein, 6 aa, synthetic construct
TALVKN

SEQ ID NO: 5356 - protein, 6 aa, synthetic construct
TGWVQY

SEQ ID NO: 5357 - protein, 6 aa, synthetic construct
TLPVQT

SEQ ID NO: 5358 - protein, 6 aa, synthetic construct
TGLVQH

SEQ ID NO: 5359 - protein, 6 aa, synthetic construct
TPTVQN

SEQ ID NO: 5360 - protein, 6 aa, synthetic construct
TASVQK

SEQ ID NO: 5361 - protein, 6 aa, synthetic construct
TSPVQI

SEQ ID NO: 5362 - protein, 6 aa, synthetic construct
IGWVQN

SEQ ID NO: 5363 - protein, 6 aa, synthetic construct
TGWDKN

SEQ ID NO: 5364 - protein, 6 aa, synthetic construct
KSSVQN

SEQ ID NO: 5365 - protein, 6 aa, synthetic construct
TGYVQN

SEQ ID NO: 5366 - protein, 6 aa, synthetic construct
RGWVQT

SEQ ID NO: 5367 - protein, 6 aa, synthetic construct
RSLVQN

SEQ ID NO: 5368 - protein, 6 aa, synthetic construct
TGGVEN

SEQ ID NO: 5369 - protein, 6 aa, synthetic construct
TGCVRN

SEQ ID NO: 5370 - protein, 6 aa, synthetic construct
LSPVQS

SEQ ID NO: 5371 - protein, 6 aa, synthetic construct
TGPVQT

SEQ ID NO: 5372 - protein, 6 aa, synthetic construct
TVGVQK

SEQ ID NO: 5373 - protein, 6 aa, synthetic construct
TASGQN

SEQ ID NO: 5374 - protein, 6 aa, synthetic construct
SVSVQN

SEQ ID NO: 5375 - protein, 6 aa, synthetic construct
SGPVQT

SEQ ID NO: 5376 - protein, 6 aa, synthetic construct
VMSVKN

SEQ ID NO: 5377 - protein, 6 aa, synthetic construct
LGSVQK

SEQ ID NO: 5378 - protein, 6 aa, synthetic construct
TGLVLN

SEQ ID NO: 5379 - protein, 6 aa, synthetic construct
TSNVQN

SEQ ID NO: 5380 - protein, 6 aa, synthetic construct
TGWGHN

SEQ ID NO: 5381 - protein, 6 aa, synthetic construct
SQMVQN

SEQ ID NO: 5382 - protein, 6 aa, synthetic construct
TVSVHN

SEQ ID NO: 5383 - protein, 6 aa, synthetic construct
LSSVQT

SEQ ID NO: 5384 - protein, 6 aa, synthetic construct
TASVRN

SEQ ID NO: 5385 - protein, 6 aa, synthetic construct
VPAVQN

SEQ ID NO: 5386 - protein, 6 aa, synthetic construct
TGRVQK

SEQ ID NO: 5387 - protein, 6 aa, synthetic construct
AMSVQN

SEQ ID NO: 5388 - protein, 6 aa, synthetic construct
TAWVHN

SEQ ID NO: 5389 - protein, 6 aa, synthetic construct
TGLVRN

SEQ ID NO: 5390 - protein, 6 aa, synthetic construct
RTLVQT

SEQ ID NO: 5391 - protein, 6 aa, synthetic construct
TGSIQN

SEQ ID NO: 5392 - protein, 6 aa, synthetic construct
LSSVKN

SEQ ID NO: 5393 - protein, 6 aa, synthetic construct
TLQVQK

SEQ ID NO: 5394 - protein, 6 aa, synthetic construct
VGSVKN

SEQ ID NO: 5395 - protein, 6 aa, synthetic construct
LAPLQN

SEQ ID NO: 5396 - protein, 6 aa, synthetic construct
TPGVQN

SEQ ID NO: 5397 - protein, 6 aa, synthetic construct
LSAVQT

SEQ ID NO: 5398 - protein, 6 aa, synthetic construct
TGVVQN

SEQ ID NO: 5399 - protein, 6 aa, synthetic construct
VPQVQN

SEQ ID NO: 5400 - protein, 6 aa, synthetic construct
TGCVQK

SEQ ID NO: 5401 - protein, 6 aa, synthetic construct
TRWVQT

SEQ ID NO: 5402 - protein, 6 aa, synthetic construct
TGLDQN

SEQ ID NO: 5403 - protein, 6 aa, synthetic construct
VSSVHN

SEQ ID NO: 5404 - protein, 6 aa, synthetic construct
KGWVQT

SEQ ID NO: 5405 - protein, 6 aa, synthetic construct
SLPVQN

SEQ ID NO: 5406 - protein, 6 aa, synthetic construct
TTSVHN

SEQ ID NO: 5407 - protein, 6 aa, synthetic construct
TVWVQN

SEQ ID NO: 5408 - protein, 6 aa, synthetic construct
TAQLQN

SEQ ID NO: 5409 - protein, 6 aa, synthetic construct
TRWVKN

SEQ ID NO: 5410 - protein, 6 aa, synthetic construct
TAWIQN

SEQ ID NO: 5411 - protein, 6 aa, synthetic construct
LSQVKN

SEQ ID NO: 5412 - protein, 6 aa, synthetic construct
TSTVKN

SEQ ID NO: 5413 - protein, 6 aa, synthetic construct
ALPVQN

SEQ ID NO: 5414 - protein, 6 aa, synthetic construct
TSMVQT

SEQ ID NO: 5415 - protein, 6 aa, synthetic construct
TSSVQH

SEQ ID NO: 5416 - protein, 6 aa, synthetic construct
TAMVKN

SEQ ID NO: 5417 - protein, 6 aa, synthetic construct
TPWVQN

SEQ ID NO: 5418 - protein, 6 aa, synthetic construct
TPRVQN

SEQ ID NO: 5419 - protein, 6 aa, synthetic construct
SSSVQN

SEQ ID NO: 5420 - protein, 6 aa, synthetic construct
RPPVQN

SEQ ID NO: 5421 - protein, 6 aa, synthetic construct
LAGVKN

SEQ ID NO: 5422 - protein, 6 aa, synthetic construct
TSPAQN

SEQ ID NO: 5423 - protein, 6 aa, synthetic construct
RSPVQT

SEQ ID NO: 5424 - protein, 6 aa, synthetic construct
TGWVPH

SEQ ID NO: 5425 - protein, 6 aa, synthetic construct
PGWGQN

SEQ ID NO: 5426 - protein, 6 aa, synthetic construct
IPPVQN

SEQ ID NO: 5427 - protein, 6 aa, synthetic construct
TGRVKN

SEQ ID NO: 5428 - protein, 6 aa, synthetic construct
TGRLQN

SEQ ID NO: 5429 - protein, 6 aa, synthetic construct
LSSVQH

SEQ ID NO: 5430 - protein, 6 aa, synthetic construct
AGWVQT

SEQ ID NO: 5431 - protein, 6 aa, synthetic construct
TGLVQS

SEQ ID NO: 5432 - protein, 6 aa, synthetic construct
TGCVQI

SEQ ID NO: 5433 - protein, 6 aa, synthetic construct
RPGVQN

SEQ ID NO: 5434 - protein, 6 aa, synthetic construct
TAAVQH

SEQ ID NO: 5435 - protein, 6 aa, synthetic construct
TGCDQN

SEQ ID NO: 5436 - protein, 6 aa, synthetic construct
TGRVRN

SEQ ID NO: 5437 - protein, 6 aa, synthetic construct
TGRDQN

SEQ ID NO: 5438-8999 - skipped (3562 entries)

SEQ ID NO: 9000 - DNA, 1184 bp, synthetic construct
  source 1..1184: mol_type = other DNA
cgtgaggctccggtgcccgtcagtgggcagagcgcacatcgcccacagtccccgagaagttggggggaggggtcggcaattgaaccggtgcctagagaaggtggcgcggggtaaactgggaaagtgatgtcgtgtactggctccgcctttttcccgagggtgggggagaaccgtatataagtgcagtagtcgccgtgaacgttctttttcgcaacgggtttgccgccagaacacaggtaagtgccgtgtgtggttcccgcgggcctggcctctttacgggttatggcccttgcgtgccttgaattacttccacctggctgcagtacgtgattcttgatcccgagcttcgggttggaagtgggtgggagagttcgaggccttgcgcttaaggagccccttcgcctcgtgcttgagttgaggcctggcctgggcgctggggccgccgcgtgcgaatctggtggcaccttcgcgcctgtctcgctgctttcgataagtctctagccatttaaaatttttgatgacctgctgcgacgctttttttctggcaagatagtcttgtaaatgcgggccaagatctgcacactggtatttcggtttttggggccgcgggcggcgacggggcccgtgcgtcccagcgcacatgttcggcgaggcggggcctgcgagcgcggccaccgagaatcggacgggggtagtctcaagctggccggcctgctctggtgcctggcctcgcgccgccgtgtatcgccccgccctgggcggcaaggctggcccggtcggcaccagttgcgtgagcggaaagatggccgcttcccggccctgctgcagggagctcaaaatggaggacgcggcgctcgggagagcgggcgggtgagtcacccacacaaaggaaaagggcctttccgtcctcagccgtcgcttcatgtgactccacggagtaccgggcgccgtccaggcacctcgattagttctcgagcttttggagtacgtcgtctttaggttggggggaggggttttatgcgatggagtttccccacactgagtgggtggagactgaagttaggccagcttggcacttgatgtaattctccttggaatttgccctttttgagtttggatcttggttcattctcaagcctcagacagtggttcaaagtttttttcttccatttcaggtgtcgtga

SEQ ID NO: 9001 - DNA, 227 bp, synthetic construct
  source 1..227: mol_type = other DNA
gcccgtcagtgggcagagcgcacatcgcccacagtccccgagaagttggggggaggggtcggcaattgaaccggtgcctagagaaggtggcgcggggtaaactgggaaagtgatgtcgtgtactggctccgcctttttcccgagggtgggggagaaccgtatataagtgcagtagtcgccgtgaacgttctttttcgcaacgggtttgccgccagaacacgcgtaag

SEQ ID NO: 9002 - skipped

SEQ ID NO: 9003 - DNA, 16 bp, synthetic construct
  source 1..16: mol_type = other DNA
ggtggagaagagcatg

SEQ ID NO: 9004 - DNA, 27 bp, synthetic construct
  source 1..27: mol_type = other DNA
gtcatcactgaggtggagaagagcatg

SEQ ID NO: 9005-9007 - skipped (3 entries)

SEQ ID NO: 9008 - DNA, 222 bp, synthetic construct
  source 1..222: mol_type = other DNA
gcccgtcagtgggcagagcgcacatcgcccacagtccccgagaagttggggggaggggtcggcaattgaaccggtgcctagagaaggtggcgcggggtaaactgggaaagtgatgtcgtgtactggctccgcctttttcccgagggtgggggagaaccgtatataagtgcagtagtcgccgtgaacgttctttttcgcaacgggtttgccgccagaacacag

SEQ ID NO: 9009 - DNA, 222 bp, synthetic construct
  source 1..222: mol_type = other DNA
gcccgtcagtgggcagagcgcacatcgcccacagtccccgagaagttggggggaggggtcggcaattgaaccggtgcctagagaaggtggcgcggggtaaactgggaaagtgatgtcgtgtactggctccgcctttttcccgagggtgggggagaaccgtatataagtgcagtagtcgccgtgaacgttctttttcgcaacgggtttgccgccagaacacgc

SEQ ID NO: 9010 - skipped

SEQ ID NO: 9011 - DNA, 229 bp, synthetic construct
  source 1..229: mol_type = other DNA
gtgcccgtcagtgggcagagcgcacatcgcccacagtccccgagaagttggggggaggggtcggcaattgaaccggtgcctagagaaggtggcgcggggtaaactgggaaagtgatgtcgtgtactggctccgcctttttcccgagggtgggggagaaccgtatataagtgcagtagtcgccgtgaacgttctttttcgcaacgggtttgccgccagaacacgcgtaag

SEQ ID NO: 9012 - DNA, 235 bp, synthetic construct
  source 1..235: mol_type = other DNA
gctccggtgcccgtcagtgggcagagcgcacatcgcccacagtccccgagaagttggggggaggggtcggcaattgaaccggtgcctagagaaggtggcgcggggtaaactgggaaagtgatgtcgtgtactggctccgcctttttcccgagggtgggggagaaccgtatataagtgcagtagtcgccgtgaacgttctttttcgcaacgggtttgccgccagaacacgcgtaag

SEQ ID NO: 9013 - DNA, 241 bp, synthetic construct
  source 1..241: mol_type = other DNA
cgtgaggctccggtgcccgtcagtgggcagagcgcacatcgcccacagtccccgagaagttggggggaggggtcggcaattgaaccggtgcctagagaaggtggcgcggggtaaactgggaaagtgatgtcgtgtactggctccgcctttttcccgagggtgggggagaaccgtatataagtgcagtagtcgccgtgaacgttctttttcgcaacgggtttgccgccagaacacgcgtaag

SEQ ID NO: 9014 - DNA, 236 bp, synthetic construct
  source 1..236: mol_type = other DNA
cgtgaggctccggtgcccgtcagtgggcagagcgcacatcgcccacagtccccgagaagttggggggaggggtcggcaattgaaccggtgcctagagaaggtggcgcggggtaaactgggaaagtgatgtcgtgtactggctccgcctttttcccgagggtgggggagaaccgtatataagtgcagtagtcgccgtgaacgttctttttcgcaacgggtttgccgccagaacacag

SEQ ID NO: 9015 - DNA, 246 bp, synthetic construct
  source 1..246: mol_type = other DNA
gcatgcgtgaggctccggtgcccgtcagtgggcagagcgcacatcgcccacagtccccgagaagttggggggaggggtcggcaattgaaccggtgcctagagaaggtggcgcggggtaaactgggaaagtgatgtcgtgtactggctccgcctttttcccgagggtgggggagaaccgtatataagtgcagtagtcgccgtgaacgttctttttcgcaacgggtttgccgccagaacacgcgtaag

SEQ ID NO: 9016 - DNA, 241 bp, synthetic construct
  source 1..241: mol_type = other DNA
gcatgcgtgaggctccggtgcccgtcagtgggcagagcgcacatcgcccacagtccccgagaagttggggggaggggtcggcaattgaaccggtgcctagagaaggtggcgcggggtaaactgggaaagtgatgtcgtgtactggctccgcctttttcccgagggtgggggagaaccgtatataagtgcagtagtcgccgtgaacgttctttttcgcaacgggtttgccgccagaacacag

SEQ ID NO: 9017 - DNA, 257 bp, synthetic construct
  source 1..257: mol_type = other DNA
ggtggagaagagcatgcgtgaggctccggtgcccgtcagtgggcagagcgcacatcgcccacagtccccgagaagttggggggaggggtcggcaattgaaccggtgcctagagaaggtggcgcggggtaaactgggaaagtgatgtcgtgtactggctccgcctttttcccgagggtgggggagaaccgtatataagtgcagtagtcgccgtgaacgttctttttcgcaacgggtttgccgccagaacacgcgtaag

SEQ ID NO: 9018 - DNA, 252 bp, synthetic construct
  source 1..252: mol_type = other DNA
ggtggagaagagcatgcgtgaggctccggtgcccgtcagtgggcagagcgcacatcgcccacagtccccgagaagttggggggaggggtcggcaattgaaccggtgcctagagaaggtggcgcggggtaaactgggaaagtgatgtcgtgtactggctccgcctttttcccgagggtgggggagaaccgtatataagtgcagtagtcgccgtgaacgttctttttcgcaacgggtttgccgccagaacacag

SEQ ID NO: 9019 - DNA, 268 bp, synthetic construct
  source 1..268: mol_type = other DNA
gtcatcactgaggtggagaagagcatgcgtgaggctccggtgcccgtcagtgggcagagcgcacatcgcccacagtccccgagaagttggggggaggggtcggcaattgaaccggtgcctagagaaggtggcgcggggtaaactgggaaagtgatgtcgtgtactggctccgcctttttcccgagggtgggggagaaccgtatataagtgcagtagtcgccgtgaacgttctttttcgcaacgggtttgccgccagaacacgcgtaag

SEQ ID NO: 9020 - DNA, 263 bp, synthetic construct
  source 1..263: mol_type = other DNA
gtcatcactgaggtggagaagagcatgcgtgaggctccggtgcccgtcagtgggcagagcgcacatcgcccacagtccccgagaagttggggggaggggtcggcaattgaaccggtgcctagagaaggtggcgcggggtaaactgggaaagtgatgtcgtgtactggctccgcctttttcccgagggtgggggagaaccgtatataagtgcagtagtcgccgtgaacgttctttttcgcaacgggtttgccgccagaacacag

SEQ ID NO: 9021 - DNA, 12 bp, unidentified
  source 1..12: mol_type = unassigned DNA
gccgccaccatg

SEQ ID NO: 9022 - DNA, 11 bp, unidentified
  source 1..11: mol_type = unassigned DNA
gaggagccacc

SEQ ID NO: 9023-9199 - skipped (177 entries)

SEQ ID NO: 9200 - protein, 441 aa, Homo sapiens; identical to SEQ ID NO: 2127

SEQ ID NO: 9201 - DNA, 348 bp, synthetic construct
  source 1..348: mol_type = other DNA
aagctggtggagagcggcggcgacctggtgaagcctggcggcagcctgaagctgagctgcgccgccagcggcttcaccttcagcagctacgccatgagctgggtgagacagaaccctgagaagagactggagtgggtggccagcatcagcaagggcggcaacacctactaccctaacagcgtgaagggcagattcaccatcagcagagacaacgccagaaacatcctgtacctgcagatgagcagcctgagaagcgaggacaccgccctgtactactgcgccagaggctggggcgactacggctggttcgcctactggggccaggtgaccctggtgaccgtgagcgcc

SEQ ID NO: 9202 - DNA, 309 bp, synthetic construct
  source 1..309: mol_type = other DNA
gccaaaacgacacccccatctgtctatccactggcccctggatctgctgcccaaactaactccatggtgaccctgggatgcctggtcaagggctatttccctgagccagtgacagtgacctggaactctggatccctgtccagcggtgtgcacaccttcccagctgtcctgcagtctgacctctacactctgagcagctcagtgactgtcccctccagcacctggcccagcgagaccgtcacctgcaacgttgcccacccggccagcagcaccaaggtggacaagaaaattgtgcccagggattgtggt

SEQ ID NO: 9203 - DNA, 291 bp, synthetic construct
  source 1..291: mol_type = other DNA
gccaaaacgacacccccatctgtctatccactggcccctggatctgctgcccaaactaactccatggtgaccctgggatgcctggtcaagggctatttccctgagccagtgacagtgacctggaactctggatccctgtccagcggtgtgcacaccttcccagctgtcctgcagtctgacctctacactctgagcagctcagtgactgtcccctccagcacctggcccagcgagaccgtcacctgcaacgttgcccacccggccagcagcaccaaggtggacaagaaaatt

SEQ ID NO: 9204 - protein, 25 aa, synthetic construct
GGGGSGGGGSGGGGSGGGGSGGGGS

SEQ ID NO: 9205 - protein, 9 aa, synthetic construct
  VARIANT 6: note = V, I, L, A, F, D, or G
  VARIANT 7: note = H, N, Q, P, D, L, R, or Y
  VARIANT 8: note = L, H, I, R, or V
PLNGAXXXY

SEQ ID NO: 9206 - protein, 30 aa, synthetic construct
GGGGSGGGGSGGGGSGGGGSGGGGSGGGGS

SEQ ID NO: 9207 - protein, 40 aa, synthetic construct
GGGGSGGGGSGGGGSGGGGSGGGGSGGGGSGGGGSGGGGS

SEQ ID NO: 9208 - protein, 40 aa, synthetic construct; identical to SEQ ID NO: 9207
  VARIANT 1..40: note = This sequence may encompass 0-8 GGGGS repeating units

We claim:

1. An isolated, e.g., recombinant, AAV particle comprising an AAV capsid variant and a nucleic acid comprising a transgene encoding an antibody molecule which binds to human tau (e.g., human tau, e.g., SEQ ID NO: 9200), wherein the AAV capsid variant comprises an amino sequence comprising the following formula: [N1]-[N2], wherein:
(i) [N1] comprises X1, X2, X3, X4, and X5, wherein:
(a) position X1 is: P, Q, A, H, K, L, R, S, or T;
(b) position X2 is: L, I, V, H, or R;
(c) position X3 is: N, D, I, K, or Y;
(d) position X4 is: G, A, C, R, or S; and
(e) position X5 is: A, S, T, G, C, D, N, Q, V, or Y; and
(ii) [N2] comprises the amino acid sequence of VHLY (SEQ ID NO: 4680), VHIY (SEQ ID NO: 4681), VHVY (SEQ ID NO: 4682), or VHHY (SEQ ID NO: 4683); and/or a substitution, e.g., a conservative substitution, of any of the aforesaid amino acids in (i) and/or (ii);
wherein [N1]-[N2] is present from N-terminus to C-terminus, immediately subsequent to position 586, numbered according to any one of SEQ ID NO: 5, 8, 138, or 3636;
optionally, wherein the AAV capsid variant comprises:
(a) an amino acid sequence at least 95% identical to the amino acid sequence of positions 203-743, e.g., a VP3, of any one of SEQ ID NO: 5, 8, or 3636; or
(b) an amino acid sequence at least 95% identical to the amino acid sequence of positions 203-736, e.g., a VP3, of SEQ ID NO: 138.

2. The isolated AAV particle of claim 1, wherein [N1] comprises PLNGA (SEQ ID NO: 3679), SLNGA (SEQ ID NO: 4684), QLNGA (SEQ ID NO: 4685), ALNGA (SEQ ID NO: 4686), PLNGS (SEQ ID NO: 4687), PVNGA (SEQ ID NO: 4688), PLNGG (SEQ ID NO: 4689), PLNGT (SEQ ID NO: 4690), PLDGA (SEQ ID NO: 4691), QLNGS (SEQ ID NO: 4692), PLNGN (SEQ ID NO: 4693), SLDGA (SEQ ID NO: 4694), HLNGA (SEQ ID NO: 4695), ALNGT (SEQ ID NO: 4696), PINGA (SEQ ID NO: 4697), ALDGA (SEQ ID NO: 4698), PLNCA (SEQ ID NO: 4699), PLNGQ (SEQ ID NO: 4700), PLDSA (SEQ ID NO: 4701), RLDGA (SEQ ID NO: 4702), QLNGN (SEQ ID NO: 4703), PLNGY (SEQ ID NO: 4704), PLDSS (SEQ ID NO: 4705), PLNGC (SEQ ID NO: 4706), PLYGA (SEQ ID NO: 4707), TLNGA (SEQ ID NO: 4708), PVDGA (SEQ ID NO: 4709), PLKGA (SEQ ID NO: 4710), PLNGD (SEQ ID NO: 4711), KLDGA (SEQ ID NO: 4712), PHNGA (SEQ ID NO: 4713), PLNGV (SEQ ID NO: 4714), PLNAA (SEQ ID NO: 4715), QLNGY (SEQ ID NO: 4716), PLDGS (SEQ ID NO: 4717), LLNGA (SEQ ID NO: 4718), PLNRA (SEQ ID NO: 4719), PLIGA (SEQ ID NO: 4720), PRNGA (SEQ ID NO: 4721), or ALNGS (SEQ ID NO: 4722), or a substitution, e.g., a conservative substitution, of any of the aforesaid amino acid sequences.

3. The isolated AAV particle of claim 1 or 2, wherein [N1]-[N2] comprises:
(SEQ ID NO: 3648)
(i) PLNGAVHLY,
(SEQ ID NO: 4780)
ALDGAVHLY,
(SEQ ID NO: 4781)
ALNGAVHLY,
(SEQ ID NO: 4782)
PINGAVHLY,
(SEQ ID NO: 4783)
PLDGAVHLY,
(SEQ ID NO: 4784)
PLDSAVHLY,
(SEQ ID NO: 4785)
PLDSSVHLY,
(SEQ ID NO: 4786)
PLNGGVHLY,
(SEQ ID NO: 4787)
PLNGNVHLY,
(SEQ ID NO: 4788)
PLNGSVHLY,
(SEQ ID NO: 4789)
PLNGTVHLY,
(SEQ ID NO: 4790)
QLNGAVHLY,
(SEQ ID NO: 4791)
SLDGAVHLY,
(SEQ ID NO: 4792)
SLNGAVHLY,
(SEQ ID NO: 4793)
TLNGAVHLY,
(SEQ ID NO: 4794)
PLNGAVHIY,
(SEQ ID NO: 4795)
PLDGAVHVY,
or
(SEQ ID NO: 4796)
PLNGAVHHY;
(ii) an amino acid sequence comprising any portion of an amino acid sequence in (i), e.g., any 2, 3, 4, 5, 6, 7, or 8 amino acids, e.g., consecutive amino acids, thereof;
(iii) an amino acid sequence comprising at least one, two, or three but no more than four substitutions (e.g., conservative substitutions), relative to any of the amino acid sequences in (i); or
(iv) an amino acid sequence comprising at least one, two, or three but no more than four different amino acids, relative to any one of the amino acid sequences in (i).

4. The isolated AAV particle of any one of claims 1-3, wherein the AAV capsid variant further comprises [N3], wherein [N3] comprises X6, X7, X8, and X9, wherein:
(a) position X6 is: A, D, S, or T;
(b) position X7 is: Q, K, H, L, P, or R;
(c) position X8 is: A, P, E, or R; and
(d) position X9 is: Q, H, K, or P; or a substitution, e.g., a conservative substitution, of any of the aforesaid amino acids in (a)-(d).

5. The isolated AAV particle of claim 4, wherein [N3] comprises AQAQ (SEQ ID NO: 4737), SQAQ (SEQ ID NO: 4738), AQPQ (SEQ ID NO: 4739), AQSQ (SEQ ID NO: 4740), AKAQ (SEQ ID NO: 4741), AHAQ (SEQ ID NO: 4742), AQAP (SEQ ID NO: 4743), DQAQ (SEQ ID NO: 4744), APAQ (SEQ ID NO: 4745), AQAK (SEQ ID NO: 4746), AQAH (SEQ ID NO: 4747), AQEQ (SEQ ID NO: 4748), ALAQ (SEQ ID NO: 4749), ARAQ (SEQ ID NO: 4750), or TQAQ (SEQ ID NO: 4751), or a substitution, e.g., a conservative substitution, of any of the aforesaid amino acid sequences.

6. The isolated AAV particle of any one of any one of claims 1-5, wherein the AAV capsid variant further comprises [N4], wherein [N4] comprises X10, X11, and X12, wherein:
(a) position X10 is: L, T, V, R, S, A, C, I, K, M, N, P, or Q;
(b) position X11 is: S, G, A, T, M, V, Q, L, H, I, K, N, P, R, or Y; and
(c) position X12 is: P, W, S, G, A, Q, L, M, K, C, E, F, H, R, T, V, or Y; or a substitution, e.g., a conservative substitution, of any of the aforesaid amino acids in (a)-(c).

7. The isolated AAV particle of claim 6, wherein [N4] comprises:
(i) LSP, TGW, TGL, TGS, TGG, TAW, TGR, TAS, LSS, TSS, SSL, SSS, TLS, TVS, VSS, TSP, VSP, TMS, VAS, TAL, TTS, TLP, VLP, RGW, LSG, LAS, SSP, LLP, STS, TSA, TTP, SAL, LGS, VTP, VSA, IGW, TGF, LTP, TLA, LSA, TVG, TAP, TMP, TSL, VQS, SSM, SLP, VSQ, RSS, TST, VMS, TTA, TQP, LST, LAP, TVA, RLS, TGY, TSG, TAG, VMP, TSQ, TMA, VGS, TSW, TGV, TGT, TLG, LMP, VQP, TGM, SMS, SQL, IGS, RSV, TAA, STP, LSQ, TAQ, TGP, ASP, VSG, SAP, TLQ, LQP, TAT, TGQ, ATS, IGG, VAA, TSM, TVW, TAM, TGA, VAT, QSP, TQA, VQA, RSP, LAT, VAQ, LAA, RST, RTL, LGT, LMS, LGP, RTS, SQP, VLG, SVS, TMQ, SAV, LAG, SGP, TNS, RLT, TTQ, SAA, TSV, RLG, RAS, STQ, CSP, SAG, ALP, VTS, ISP, SVG, LTS, TTT, RSG, TQL, LNP, TVQ, IAS, LAQ, LSR, LSN, TTG, TSN, SMA, TKS, SVA, TQQ, VQQ, RLP, SAM, TAV, TQW, SSR, TQT, VNS, RSA, LMG, RQS, LVG, VTA, RTT, SMG, VMA, TKP, SAQ, NSP, ATP, VAG, RGS, VKP, RMS, NLP, NAL, RTP, RQL, VQG, VTG, VST, NAS, RVE, ATG, AMS, RNS, VMQ, SMQ, LQQ, TMG, LGQ, TSH, AAP, RSQ, TYS, ITP, VAK, TQM, TKA, SQQ, ISG, VSR, RTA, RML, SQM, VAN, CTP, ISS, AGP, TAK, RTG, LHP, TMT, AQP, QAP, RQP, LKS, NTT, TSK, RYS, KSS, NTP, VGG, IAA, LMA, MAP, VHP, VLS, LAN, ATQ, TNA, TAN, VSN, AAA, AVG, LTA, SAN, RAG, RQG, TLR, LSH, SAF, RAA, IQP, ILG, VNG, SVQ, LSK, TNG, RTQ, TMN, RGG, TTR, VRP, VKA, LAR, NQP, TMK, TYA, TQK, TTK, IAG, TQN, LAH, NTQ, RQQ, RAQ, TKQ, TQH, TNQ, LMQ, VNA, VQT, TQR, VGK, VKQ, IQS, LQR, TMM, VGN, RIG, SAK, RIA, VQN, NVQ, RIP, NAQ, NMQ, TPS, LTN, VTK, PGW, LPP, SPP, TPA, TGC, VPP, TPT, TPW, TPP, RPP, TPQ, TPR, TPG, VPA, VPQ, RPG, KGW, TRW, TAR, IPP, RSL, LVP, KGS, VAP, KGG, KAW, PGS, TRL, or AGW, or a substitution, e.g., a conservative substitution, of any of the aforesaid amino acid sequences;
(ii) LSP; or
(iii) TGW.

8. The isolated AAV particle of any one of claims 1-7, wherein the AAV capsid variant further comprises [N5], wherein [N5] comprises X13, X14, and X15, wherein:
(a) position X13 is: V, D, F, G, L, A, E, or I;
(b) position X14 is: K, P Q, R, H, E, or L; and
(c) position X15 is: N, T, K, H, D, Y, S, I, or P; or a substitution, e.g., a conservative substitution, of any of the aforesaid amino acids in (a)-(c).

9. The isolated AAV particle of claim 8, wherein [N5] comprises:
(i) VQN, VPN, VKN, VQT, VQK, DQN, VQH, GQN, VQI, VHN, FQN, LQN, VLN, VRN, VQS, VQY, AQN, VEN, VQD, IQN, VKK, DKN, VKT, VQP, EQN, GQT, FQK, GHN, or VPH, or a substitution, e.g., a conservative substitution, of any of the aforesaid amino acid sequences;
(ii) VKN, VPN, VEN, or VHN; or
(iii) VQN.

10. The isolated AAV particle of claim 8 or 9, wherein [N1]-[N2]-[N3]-[N4]-[N5] comprises:
(i) the amino acid sequence of any of SEQ ID NOs: 139-1138;
(ii) the amino acid sequence of PLNGAVHLYAQAQLSPVKN (SEQ ID NO: 566);
(iii) the amino acid sequence of PLNGAVHLYAQAQTGWVPN (SEQ ID NO: 314);
(iv) the amino acid sequence of PLNGAVHLY (SEQ ID NO: 3648);
(v) the amino acid sequence of any of SEQ ID NOs: 1200-1203, 40-136, 314, 325, 491, 499, 529, 558, 566, 576, 603, 610, 625, 631, 648, 649, 700, 703, 720, 755, 763, 765, 771, 791, 804, 816, 818, 819, 828, 859, 864, 871, 885, 946, 960, 966, 978, 979, 1016, 1033, 1032, 1037, 1058, 1081, 1100, 1122, or 1204-1223;
(vi) an amino acid sequence comprising any portion of an amino acid sequence in (i)-(v), e.g., any 2, 3, 4, 5, 6, 7, 8, 9, 10, 11, 12, 13, 14, 15, 16, 17, or 18 amino acids, e.g., consecutive amino acids, thereof;
(vii) an amino acid sequence comprising at least one, two, or three but no more than four substitutions (e.g., conservative substitutions), insertions, or deletions, relative to any of the amino acid sequences in (i)-(v); or
(viii) an amino acid sequence comprising at least one, two, or three but no more than four different amino acids, relative to any one of the amino acid sequences in (i)-(v).

11. The isolated AAV particle of any one of claims 8-10, wherein the AAV capsid variant comprises from N-terminus to C-terminus [N1]-[N2]-[N3]-[N4]-[N5], wherein:
(i) [N1] is present immediately subsequent to position 586, and replaces positions 587 and 588 (e.g., A587 and Q588), numbered according to SEQ ID NO: 138;
(ii) [N2] is present immediately subsequent to [N1];
(iii) [N3] is present immediately subsequent to position 588, and replaces positions 589-592 (e.g., A589, Q590, A591, Q592), numbered according to the amino acid sequence of SEQ ID NO: 138;
(iv) [N4] is present immediately subsequent to position 592, and replaces positions 593-595 (e.g., T593, G594, W595), numbered according to the amino acid sequence of SEQ ID NO: 138;
(v) [N5] is present immediately subsequent to position 595, and replaces positions 596-598 (e.g., V596, Q597, N598), numbered according to the amino acid sequence of SEQ ID NO: 138; and/or
(vi) [N1]-[N2]-[N3]-[N4]-[N5] is present immediately subsequent to position 586 and replaces positions 587-598 (e.g., A587, Q588, A589, Q590, A591, Q592, T593, G594, W595, V596, Q597, N598), numbered according to SEQ ID NO: 138.

12. The isolated AAV particle of any one of claims 8-11, wherein:
(i) the AAV capsid variant comprises an amino acid other than A at position 587 and/or an amino acid other than Q at position 588, numbered according to SEQ ID NO: 138;
(ii) [N1] corresponds to positions 587-591 of SEQ ID NO: 5, 8, or 3636;
(iii) [N2] corresponds to positions 592 to 595 of SEQ ID NO: 5, 8, or 3636;
(iv) [N3] corresponds to positions 596-599 of SEQ ID NO: 5, 8, or 3636;
(v) [N4] corresponds to positions 600-602 of SEQ ID NO: 5, 8, or 3636;
(vi) [N5] corresponds to positions 603-605 of SEQ ID NO: 5, 8, or 3636; and/or
(vii) [N1]-[N2]-[N3]-[N4]-[N5] corresponds to positions 587-605 of SEQ ID NO: 5, 8, or 3636.

13. An isolated, e.g., recombinant, AAV particle comprising an AAV capsid variant and a nucleic acid comprising a transgene encoding an antibody molecule which binds to tau (e.g., human tau), wherein the AAV capsid variant comprises [A][B], wherein [A] comprises the amino acid sequence of PLNGA, and [B] comprises X1, X2, X3, X4, wherein:
(i) X1 is: V, I, L, A, F, D, or G;
(ii) X2 is: H, N, Q, P, D, L, R, or Y;
(iii) X3 is: L, H, I, R, or V; and
(iv) X4 is Y; and/or
wherein the AAV capsid variant comprises an amino acid modification, e.g., a conservative substitution, of any of the aforesaid amino acids in (i)-(iv);
wherein [A][B] is present from N-terminus to C-terminus, immediately subsequent to position 586, numbered according to any one of SEQ ID NO: 5, 8, 138, or 3636;
optionally wherein the AAV capsid variant comprises:
(a) an amino acid sequence at least 95% identical to the amino acid sequence of positions 203-743, e.g., a VP3, of any one of SEQ ID NO: 5, 8, or 3636; or
(b) an amino acid sequence at least 95% identical to the amino acid sequence of positions 203-736, e.g., a VP3, of SEQ ID NO: 138.

14. The isolated AAV particle of claim 13, wherein [B] is or comprises:
(i) VHLY (SEQ ID NO: 4680), VHHY (SEQ ID NO: 4683), VHIY (SEQ ID NO: 4681), VNLY (SEQ ID NO: 4724), VQLY (SEQ ID NO: 4729), IHLY (SEQ ID NO: 4730), LHLY (SEQ ID NO: 4727), VPLY (SEQ ID NO: 4723), VDLY (SEQ ID NO: 4731), AHLY (SEQ ID NO: 4732), VHRY (SEQ ID NO: 4725), FHLY (SEQ ID NO: 4726), DHLY (SEQ ID NO: 4728), VLLY (SEQ ID NO: 4733), GHLY (SEQ ID NO: 4734), VRLY (SEQ ID NO: 4735), VHVY (SEQ ID NO: 4682), or VYLY (SEQ ID NO: 4736), or a substitution, e.g., a conservative substitution, of any of the aforesaid amino acid sequences; or
(ii) VHLY (SEQ ID NO: 4680).

15. The isolated AAV particle of claim 13 or 14, wherein [A][B] comprises:
(SEQ ID NO: 3648)
(i) PLNGAVHLY,
(SEQ ID NO: 4796)
PLNGAVHHY,
(SEQ ID NO: 4794)
PLNGAVHIY,
(SEQ ID NO: 5123)
PLNGAVNLY,
(SEQ ID NO: 5124)
PLNGAVQLY,
(SEQ ID NO: 5125)
PLNGAIHLY,
(SEQ ID NO: 5126)
PLNGALHLY,
(SEQ ID NO: 5127)
PLNGAVPLY,
(SEQ ID NO: 5128)
PLNGAVDLY,
(SEQ ID NO: 5129)
PLNGAAHLY,
(SEQ ID NO: 5130)
PLNGAVHRY,
(SEQ ID NO: 5131)
PLNGAFHLY,
(SEQ ID NO: 5132)
PLNGADHLY,
(SEQ ID NO: 5133)
PLNGAVLLY,
(SEQ ID NO: 5134)
PLNGAGHLY,
(SEQ ID NO: 5135)
PLNGAVRLY,
(SEQ ID NO: 5136)
PLNGAVHVY,
or
(SEQ ID NO: 5137)
PLNGAVYLY;
(SEQ ID NO: 3648)
(ii) PLNGAVHLY;
(iii) an amino acid sequence comprising any portion of an amino acid sequence in (i) or (ii), e.g., any 2, 3, 4, 5, 6, 7, or 8 amino acids, e.g., consecutive amino acids, thereof;
(iv) an amino acid sequence comprising at least one, two, or three but no more than four substitutions (e.g., conservative substitutions), insertions, or deletions, relative to any of the amino acid sequences in (i) or (ii); or
(v) an amino acid sequence comprising at least one, two, or three but no more than four different amino acids, relative to any one of the amino acid sequences in (i) or (ii).

16. The isolated AAV particle of any one of claims 13-15, wherein the AAV capsid variant further comprises [C], wherein [C] comprises X4, X5, X6, and X7, wherein:
(a) position X4 is: A, D, S, or T;
(b) position X5 is: Q, K, H, L, P, or R;
(c) position X6 is: A, P, or E; and
(d) position X7 is: Q, H, K, or P;
or a substitution, e.g., a conservative substitution, of any of the aforesaid amino acids in (a)-(d).

17. The isolated AAV particle of claim 16, wherein [C] is or comprises:
(i) AQAQ (SEQ ID NO: 4737), AQPQ (SEQ ID NO: 4739), AKAQ (SEQ ID NO: 4741), DQAQ (SEQ ID NO: 4744), SQAQ (SEQ ID NO: 4738), AHAQ (SEQ ID NO: 4742), AQEQ (SEQ ID NO: 4748), AQAK (SEQ ID NO: 4746), ALAQ (SEQ ID NO: 4749), APAQ (SEQ ID NO: 4745), ARAQ (SEQ ID NO: 4750), AQAH (SEQ ID NO: 4747), AQAP (SEQ ID NO: 4743), or TQAQ (SEQ ID NO: 4751), or a substitution, e.g., a conservative substitution, of any of the aforesaid amino acid sequences; or
(ii) AQAQ (SEQ ID NO: 4737).

18. The isolated AAV particle of any one of claims 1-17, wherein the AAV capsid variant further comprises:
(i) the amino acid L at position 593 numbered according to SEQ ID NO: 138 or at position 600 numbered according to SEQ ID NO: 5, 8, or 3636; the amino acid S at position 594 numbered according to SEQ ID NO: 138, or at position 601 numbered according to SEQ ID NO: 5, 8, or 3636; and the amino acid P at position 595 numbered according to SEQ ID NO: 138 or at position 602 numbered according to SEQ ID NO: 5, 8, or 3636; or
(ii) the amino acid T at position 593 numbered according to SEQ ID NO: 138 or at position 600 numbered according to SEQ ID NO: 5, 8, or 3636; the amino acid G at position 594 numbered according to SEQ ID NO: 138, or at position 601 numbered according to SEQ ID NO: 5, 8, or 3636; and the amino acid W at position 595 numbered according to SEQ ID NO: 138 or at position 602 numbered according to SEQ ID NO: 5, 8, or 3636.

19. The isolated AAV particle of any one of claims 13-18, wherein the AAV capsid variant further comprises [D], wherein [D] comprises X8, X9, and X10, wherein:
(a) position X8 is: L, T, V, S, R, I, A, N, C, Q, M, P, or K;
(b) position X9 is: S, G, T, M, A, G, K, Q, V, I, R, N, P, L, H, or Y; and
(c) position X10 is: P, W, K, Q, S, C, A, G, N, T, R, V, M, H, L, E, F, or Y; or a substitution, e.g., a conservative substitution, of any of the aforesaid amino acids in (a)-(c).

20. The isolated AAV particle of any one of claims 13-19, wherein [D] is or comprises:
(i) LSP, TGW, TTK, TMK, VAQ, TAW, TGS, VKQ, SAP, LSK, LAP, LAQ, TAK, SAK, TGC, TQK, TVA, TTQ, TAQ, RIA, RAS, TTP, LTP, STP, TSP, TMQ, TSK, VSQ, VSP, TVQ, VTA, RQP, ISG, VRP, LGP, TNQ, VQQ, VAN, AAP, RST, TMA, IQP, IAS, TVS, RGS, NSP, LQP, VTG, VMQ, SMA, VGK, IQS, CSP, LQR, TPP, VTK, SSP, AGP, LAR, TTT, TGG, TLQ, TMS, VAK, RAA, TVG, LNP, LSQ, TKP, TNA, LAT, VTP, VQA, TTS, CTP, TAG, TSQ, TMN, TST, VKP, ASP, VAA, LKS, IAA, TAA, TKA, VSN, TAP, LMP, LHP, RAQ, LTN, RTT, TSV, RMS, VGN, LMQ, TAT, VHP, ISS, VAS, TRW, TMT, RSS, RTG, VAT, VTS, VSS, TNS, VKA, SGP, TGP, TAM, TQP, TQQ, VSR, VSA, VLS, TQH, LAS, QAP, NAQ, ATP, VQP, TTA, LAA, RSG, LMA, TMP, LAN, VST, SAQ, NTP, TGL, TAV, RLG, RTL, TQM, ITP, TVW, RSA, TAS, TMG, VQS, ISP, VGG, TAL, LAG, RTA, RSP, TLA, LAH, TSL, RLS, LMG, SMQ, TQT, VGS, VSG, VMA, IGG, IAG, TGR, LSH, VQT, RNS, TLP, TKQ, LGQ, NMQ, NVQ, RGG, VMS, TTG, LSR, MAP, ILG, TGT, TSS, TSH, RIG, SAM, TSM, SMG, SMS, TSG, TGA, VNS, VAG, IGS, LGS, VNG, LTA, VQN, TKS, SVG, NAS, TSA, TAN, LTS, RSQ, RIP, RVE, VLP, SVA, LQQ, LST, SAA, RTS, TQN, VNA, LMS, TMM, RSV, TQL, RTP, RQQ, VQG, PGW, STQ, QSP, RYS, TQR, SAG, RQS, SQP, STS, VLG, NQP, LGT, RAG, TGM, LSN, RLP, RQG, RLT, TLR, SAF, SVQ, LLP, RTQ, LPP, AQP, TPQ, TSW, NTT, TTR, TQW, NTQ, TYA, TLS, NLP, ATS, ATQ, LSS, TQA, VMP, NAL, RML, RQL, TLG, TGF, SAL, SQL, LSA, TGQ, TNG, AAA, SAV, LSG, SSR, SPP, LVG, TPA, KGW, VPP, ATG, SAN, SQQ, SSM, AVG, VAP, TPS, RGW, SSL, TYS, TPT, IGW, KSS, TGY, RSL, SVS, TSN, SQM, VPA, AMS, TPG, TGV, VPQ, SLP, ALP, TPW, TPR, SSS, RPP, IPP, AGW, or RPG, or a substitution, e.g., a conservative substitution, of any of the aforesaid amino acid sequences;
(ii) LSP; or
(iii) TGW.

21. The isolated AAV particle of any one of claims 1-20, wherein the AAV capsid variant further comprises:
(i) the amino acid V at position 596 numbered according to SEQ ID NO: 138 or at position 603 numbered according to SEQ ID NO: 5, 8, or 3636; the amino acid K, P, E or H at position 597 numbered according to SEQ ID NO: 138 or at position 604 numbered according to SEQ ID NO: 5, 8, or 3636; and the amino acid N at position 598 numbered according to the amino acid sequence of SEQ ID NO: 138 or at position 605 numbered according to SEQ ID NO: 5, 8, or 3636;
(ii) the amino acid V at position 596 numbered according to SEQ ID NO: 138 or at position 603 numbered according to SEQ ID NO: 5, 8, or 3636; the amino acid K at position 597 numbered according to SEQ ID NO: 138 or at position 604 numbered according to SEQ ID NO: 5, 8, or 3636; and the amino acid N at position 598 numbered according to the amino acid sequence of SEQ ID NO: 138 or at position 605 numbered according to SEQ ID NO: 5, 8, or 3636;
(iii) the amino acid V at position 596 numbered according to SEQ ID NO: 138 or at position 603 numbered according to SEQ ID NO: 5, 8, or 3636; the amino acid P at position 597 numbered according to SEQ ID NO: 138 or at position 604 numbered according to SEQ ID NO: 5, 8, or 3636; and the amino acid N at position 598 numbered according to the amino acid sequence of SEQ ID NO: 138 or at position 605 numbered according to SEQ ID NO: 5, 8, or 3636; or
(iv) the amino acid V at position 596 numbered according to SEQ ID NO: 138 or at position 603 numbered according to SEQ ID NO: 5, 8, or 3636; the amino acid Q at position 597 numbered according to SEQ ID NO: 138 or at position 604 numbered according to SEQ ID NO: 5, 8, or 3636; and the amino acid N at position 598 numbered according to the amino acid sequence of SEQ ID NO: 138 or at position 605 numbered according to SEQ ID NO: 5, 8, or 3636.

22. The isolated AAV particle of any one of claims 13-21, wherein the AAV capsid variant further comprises [E], wherein [E] comprises X11, X12, and X13, wherein:
(a) position X11 is: V, D, F, A, E, L, G, or I;
(b) position X12 is: Q, R, P, K, L, H, or E; and
(c) position X13 is: N, H, S, T, P, K, I, D, or Y; or a substitution, e.g., a conservative substitution, of any of the aforesaid amino acids in (a)-(c).

23. The isolated AAV particle of claim 22, wherein [E] comprises:
(i) VQN, DQN, VQH, FQN, VQS, VQT, VQP, VRN, VPN, VKN, AQN, VQK, EQN, VQI, LQN, GQT, VLN, VQD, VHN, GQN, VKT, VKK, FQK, VEN, VQY, DKN, GHN, IQN, or VPH, or a substitution, e.g., a conservative substitution, of any of the aforesaid amino acid sequences; or
(ii) VKN, VPN, or VQN.

24. The isolated AAV particle of claim 22 or 23, wherein [A][B][C][D][E] comprises:
(i) the amino acid sequence of any of SEQ ID NOs: 143, 148, 149, 151, 153, 154-158, 160-163, 166, 168, 170, 171, 173-175, 177-179, 181, 182, 184-188, 191-197, 199-210,212-215, 217-225, 227-231, 233, 234, 236-240, 243-262, 265, 267, 268, 270-277, 279, 282, 284-286, 288-293, 295, 296, 298, 300-314, 316-327, 329, 331, 332, 334, 336, 337-344, 346-350, 352-354, 356-365, 367, 369, 371-380, 382-385, 387, 392-394, 396, 397, 399-401, 404-411, 413-415, 417, 419-429, 432, 433, 435-437, 438, 440-442, 444-447, 450-454, 456, 458-461, 464, 465, 467-469, 471-484, 487-495, 497, 498, 500-503, 505, 507-512, 514-517, 522-525, 528-539, 542-545, 547, 551-555, 558-561, 563-568, 570, 573, 574, 576, 579, 581, 582, 584, 586, 587, 591-596, 598, 601, 604, 605, 606, 607, 610, 612, 614-619, 624-629, 631-636, 640, 641, 645, 646, 649, 650, 656, 658, 661, 663, 664, 666, 668, 669, 670, 672, 673, 674, 675, 677, 679, 683, 684, 686, 688, 689, 691, 693, 695, 696, 697, 699, 700, 701, 702, 704-706, 709-714, 720, 722, 725-731, 733, 736, 740, 745, 749-752, 754, 755, 757, 758, 760-765, 767, 768, 770, 771, 773, 778-780, 783-788, 792-794, 797-799, 801, 802, 804-806, 812, 814, 815, 817, 818, 820, 821, 824, 828, 831, 832, 834-837, 839, 840-845, 847, 848, 850-855, 857-859, 861, 862, 865, 866, 869-872, 874-876, 882-884, 887, 889-895, 897, 899, 901, 903-905, 907, 908, 910, 911, 913, 915, 919, 920, 923, 924, 926, 927, 929, 931-933, 935, 937, 939-949, 952-955, 957, 958, 960, 962, 964, 965, 967, 971, 973, 974, 976, 977, 981, 985-989, 992, 994, 997-1000, 1002, 1004, 1006-1008, 1010, 1013, 1015, 1017, 1018, 1020, 1021, 1023-1025, 1027, 1029-1031, 1033-1035, 1037-1040, 1043, 1046, 1049, 1052, 1053, 1056, 1057, 1059, 1062, 1064, 1065, 1067, 1068, 1070, 1073, 1075, 1077-1080, 1083-1087, 1089, 1090, 1093, 1094, 1097, 1100, 1101, 1103, 1105-1107, 1110-1112, 1114-1117, 1119, 1121, 1125, 1126, 1129, 1132, 1133, 1135;
(SEQ ID NO: 566)
(ii) PLNGAVHLYAQAQLSPVKN;
(SEQ ID NO: 314)
(iii) PLNGAVHLYAQAQTGWVPN;
(SEQ ID NO: 3648)
(iv) PLNGAVHLY;
(v) an amino acid sequence comprising any portion of an amino acid sequence in (i)-(iv), e.g., any 2, 3, 4, 5, 6, 7, 8, 9, 10, 11, 12, 13, 14, 15, 16, 17, or 18 amino acids, e.g., consecutive amino acids, thereof;
(vi) an amino acid sequence comprising at least one, two, or three but no more than four substitutions (e.g., conservative substitutions), insertions, or deletions, relative to any of the amino acid sequences in (i)-(iv); or
(vii) an amino acid sequence comprising at least one, two, or three but no more than four different amino acids, relative to any one of the amino acid sequences in (i)-(iv).

25. The isolated AAV particle of any one of claims 22-24, which comprises from N-terminus to C-terminus [A][B][C][D][E], wherein:
(i) [A] is present immediately subsequent to position 586, and replaces positions 587 and 588 (e.g., A587 and Q588), numbered according to SEQ ID NO: 138;
(ii) [B] is present immediately subsequent to [A];
(iii) [C] is present immediately subsequent to position 588, and replaces positions 589-592 (e.g., A589, Q590, A591, Q592), numbered according to the amino acid sequence of SEQ ID NO: 138;
(iv) [D] is present immediately subsequent to position 592, and replaces positions 593-595 (e.g., T593, G594, W595), numbered according to the amino acid sequence of SEQ ID NO: 138;
(v) [E] is present immediately subsequent to position 595, and replaces positions 596-598 (e.g., V596, Q597, N598), numbered according to the amino acid sequence of SEQ ID NO: 138; and/or
(vi) [A][B][C][D][E] is present immediately subsequent to position 586 and replaces positions 587-598 (e.g., A587, Q588, A589, Q590, A591, Q592, T593, G594, W595, V596, Q597, N598), numbered according to SEQ ID NO: 138.

26. The isolated AAV particle of any one of claims 22-25, wherein:
(i) the AAV capsid variant comprises an amino acid other than A at position 587 and/or an amino acid other than Q at position 588, numbered according to SEQ ID NO: 138;
(ii) [A] corresponds to positions 587-591 of SEQ ID NO: 5, 8, or 3636;
(iii) [B] corresponds to positions 592 to 595 of SEQ ID NO: 5, 8, or 3636;
(iv) [C] corresponds to positions 596-599 of SEQ ID NO: 5, 8, or 3636;
(v) [D] corresponds to positions 600-602 of SEQ ID NO: 5, 8, or 3636;
(vi) [E] corresponds to positions 603-605 of SEQ ID NO: 5, 8, or 3636; and/or
(vii) [A][B][C][D][E] corresponds to positions 587-605 of SEQ ID NO: 5, 8, or 3636.

27. The isolated AAV particle of any one of claims 1-26, which comprises:
(i) the amino acid sequence corresponding to positions 203-743, e.g., a VP3, of any one of SEQ ID NOs: 5, 8, or 3636, or a sequence with at least 90%, 95%, 96%, 97%, 98%, or 99% sequence identity thereto;
(ii) the amino acid sequence corresponding to positions 138-743, e.g., a VP2, of any one of SEQ ID NOs: 5, 8, or 3636, or a sequence with at least 90%, 95%, 96%, 97%, 98%, or 99% sequence identity thereto;
(iii) the amino acid sequence of any one of SEQ ID NOs: 5, 8, or 3636 (e.g., a VP1), or an amino acid sequence with at least 90%, 95%, 96%, 97%, 98%, or 99% sequence identity thereto;
(iv) an amino acid sequence comprising at least one, two or three modifications, e.g., substitutions (e.g., conservative substitutions), but not more than 30, 20 or 10 modifications, e.g., substitutions (e.g., conservative substitutions), relative to the amino acid sequence of any one of SEQ ID NO: 5, 8, or 3636; and/or
(v) an amino acid sequence comprising at least one, two or three, but not more than 30, 20 or 10 different amino acids, relative to the amino acid sequence of any one of SEQ ID NO: 5, 8, or 3636.

28. An isolated, e.g., recombinant, AAV particle comprising an AAV capsid variant and a nucleic acid comprising a transgene encoding an antibody molecule which binds to tau (e.g., human tau), wherein the AAV capsid variant comprises:
(i) the amino acid sequence of PLNGAVHLY (SEQ ID NO: 3648);
(ii) an amino acid sequence comprising at least 5, 6, 7, 8, or 9 consecutive amino acids from the amino acid sequence of PLNGAVHLY (SEQ ID NO: 3648);
(iii) an amino acid sequence comprising at least one, two, or three but no more than four substitutions (e.g., conservative substitutions), relative to the amino acid sequence of PLNGAVHLY (SEQ ID NO: 3648); or
(iv) an amino acid sequence comprising at least one, two, or three but no more than four different amino acids relative to the amino acid sequence of PLNGAVHLY (SEQ ID NO: 3648)
wherein the amino acid sequence of (i)-(iv) is present immediately subsequent to position 586, numbered according to any one of SEQ ID NOs: 5, 8, 138, or 3636;
optionally wherein the AAV capsid variant further comprises:
(a) a VP1 protein comprising the amino acid sequence of SEQ ID NO: 5, 8, 3636;
(b) a VP2 protein comprising the amino acid sequence of positions 138-743 of SEQ ID NO: 5, 8, or 3636;
(c) a VP3 protein comprising the amino acid sequence of positions 203-743 of SEQ ID NO: 5, 8, or 3636; or
(d) an amino acid sequence at least 90% (e.g., at least 92%, 95%, 96%, 97%, 98%, or 99%) identical to any one the amino acid sequences of (a)-(b).

29. The isolated AAV particle of any one of claims 1-28, wherein the antibody molecule:
(i) binds to the N-terminal region or an epitope within the N-terminal region of a tau protein (e.g., human tau),
(ii) binds to the mid-domain region or an epitope within the mid-domain region of a tau protein (e.g., human tau),
(iii) binds to the C-terminal region or an epitope within the C-terminal region of a tau protein (e.g., human tau),
(iv) binds to the microtubule-binding domain or an epitope within the microtubule-binding domain of a tau protein (e.g., human tau),
(v) binds to a region that overlaps with the N-terminal domain and the mid-domain of a tau protein (e.g., human tau),
(vi) binds to a region that overlaps with the mid-domain and the microtubule-binding domain of a tau protein (e.g., human tau), or
(vii) binds to a region that overlaps with the mid-domain and the C-terminal domain of a tau protein (e.g., human tau).

30. The isolated AAV particle of any one of claims 1-29, wherein the antibody molecule comprises a heavy chain variable region (VH) comprising an HC CDR1, an HC CDR2, and an HC CDR3, and a light chain variable region (VL) comprising an LC CDR1, an LC CDR2, and an LC CDR3, wherein:
(i) the HCDR1, HCDR2, and HCDR3 comprise the amino acid sequences of SEQ ID NOs: 1553, 1554, and 1552, respectively; and the LCDR1, LCDR2, and LCDR3 comprise the amino acid sequences of SEQ ID NOs: 1567, 1565, and 1566, respectively;
(ii) the HCDR1, HCDR2, and HCDR3 comprise the amino acid sequences of SEQ ID NOs: 1576, 1577, and 1552, respectively; and the LCDR1, LCDR2, and LCDR3 comprise the amino acid sequences of SEQ ID NOs: 1585, 1565, and 1566, respectively;
(iii) the HCDR1, HCDR2, and HCDR3 comprise the amino acid sequences of SEQ ID NOs: 1594, 1595, and 1552, respectively; and the LCDR1, LCDR2, and LCDR3 comprise the amino acid sequences of SEQ ID NOs: 1601, 1602, and 1566, respectively;
(iv) the HCDR1, HCDR2, and HCDR3 comprise the amino acid sequences of SEQ ID NOs: 1503, 1504, and 1502, respectively; and LCDR1, LCDR2, and LCDR3 comprise the amino acid sequences of SEQ ID NOs: 1514, 1515, and 1516, respectively;
(v) the HCDR1, HCDR2, and HCDR3 comprise the amino acid sequences of SEQ ID NOs: 1528, 1529, and 1527, respectively; and the LCDR1, LCDR2, and LCDR3 comprise the amino acid sequences of SEQ ID NOs: 1539, 1540, and 1541, respectively;
(vi) the HCDR1, HCDR2, and HCDR3 comprise the amino acid sequences of SEQ ID NOs: 1611, 1612, and 1610, respectively; and the LCDR1, LCDR2, and LCDR3 comprise the amino acid sequences of SEQ ID NOs: 1621, 1622, and 1623, respectively;
(vii) the HC CDR1, HC CDR2, and HC CDR3 comprise the amino acid sequence of any of the HC CDR sequences of Tables 7-13; and the LC CDR1, LC CDR2, LC CDR3 comprise the amino acid sequence of any of the LC CDR sequences of Tables 7-13, or
(viii) the HCDR1, HCDR2, and/or HCDR3 sequences, and/or LCDR1, LCDR2, and/or LCDR3 sequences of any one of (i)-(vii), with at most one, two, or three substitutions (e.g., conservative amino acid substitutions) in each CDR.

31. The isolated AAV particle of any one of claims 1-30, wherein the antibody molecule comprises a heavy chain variable region (VH) comprising an HC CDR1, an HC CDR2, and an HC CDR3, and a light chain variable region (VL) comprising an LC CDR1, an LC CDR2, and an LC CDR3, wherein:
(i) the HCDR1, HCDR2, and HCDR3 comprise the amino acid sequences of SEQ ID NOs: 1631, 1551, and 1552, respectively; and the LCDR1, LCDR2, and LCDR3 comprise the amino acid sequences of SEQ ID NOs: 1632, 1633, and 1566, respectively;
(ii) the HCDR1, HCDR2, and HCDR3 comprise the amino acid sequences of SEQ ID NOs: 1634, 1635, and 1552, respectively; and the LCDR1, LCDR2, and LCDR3 comprise the amino acid sequences of SEQ ID NOs: 1636, 1633, and 1566, respectively; or
(iii) the HCDR1, HCDR2, and HCDR3 comprise the amino acid sequences of SEQ ID NOs: 1637, 1638, and 1557, respectively; and the LCDR1, LCDR2, and LCDR3 comprise the amino acid sequences of SEQ ID NOs: 1639, 1569, and 1566, respectively,
optionally wherein the antibody binds to a region of a human tau protein comprising residues 409-436, numbered according to SEQ ID NO: 9200.

32. The isolated AAV particle of any one of claims 1-31, wherein:
(i) the VH of the antibody molecule comprises the amino acid sequence of SEQ ID NO: 1562, 1512, 1537, 1583, 1599, or 1619 or an amino acid sequence having at least 90%, 92%, 95%, 96%, 97%, 98%, or 99% sequence identity thereto;
(ii) the VH of the antibody molecule comprises an amino acid sequence having at least one, two or three modifications, but not more than 30, 20 or 10 modifications of the amino acid sequence of SEQ ID NO: 1562, 1512, 1537, 1583, 1599, or 1619;
(iii) the VH of the antibody molecule comprises an amino acid sequence encoded by the nucleotide sequence of SEQ ID NO: 1563, 1513, 1538, 1584, 1600, or 1620, or a nucleotide sequence having at least 90%, 92%, 95%, 96%, 97%, 98%, or 99% sequence identity thereto; or
(iv) the VH of the antibody molecule comprises an amino acid sequence of any VH provided in Tables 7-13, or an amino acid sequence having at least 90%, 92%, 95%, 96%, 97%, 98%, or 99% sequence identity thereto; or an amino acid sequence having at least one, two or three modifications, but not more than 30, 20 or 10 modifications of the amino acid sequence of any VH provided in Tables 7-13.

33. The isolated AAV particle of any one of claims 1-32, wherein:
(i) the VL of the antibody molecule comprises the amino acid sequence of SEQ ID NO: 1573, 1523, 1548, 1591, 1606, or 1629, or an amino acid sequence having at least 90%, 92%, 95%, 96%, 97%, 98%, or 99% sequence identity thereto;
(ii) the VL of the antibody molecule comprises an amino acid sequence having at least one, two or three modifications, but not more than 30, 20 or 10 modifications of the amino acid sequence of SEQ ID NO: 1573, 1523, 1548, 1591, 1606, or 1629;
(iii) the VL of the antibody molecule comprises an amino acid sequence encoded by the nucleotide sequence of SEQ ID NO: 1574, 1524, 1549, 1592, 1607, or 1630, or a nucleotide sequence having at least 90%, 92%, 95%, 96%, 97%, 98%, or 99% sequence identity thereto; or
(iv) the VL of the antibody molecule comprises the amino acid sequence of any VL provided in Tables 7-13, or an amino acid sequence having at least 90%, 92%, 95%, 96%, 97%, 98%, or 99% sequence identity thereto; or an amino acid sequence having at least one, two or three modifications, but not more than 30, 20 or 10 modifications of the amino acid sequence of any VL provided in Tables 7-13.

34. The isolated AAV particle of any one of claims 1-33, wherein:
(i) the VH of the antibody molecule comprises the amino acid sequence of SEQ ID NO: 1562 or an amino acid sequence either having at least 80%, 85%, 90%, 92%, 95%, 96%, 97%, 98%, or 99% sequence identity thereto or having at least one, two or three modifications, but not more than 10 modifications thereof, and the VL of the antibody molecule comprises the amino acid sequence of SEQ ID NO: 1573 or an amino acid sequence either having at least 80%, 85%, 90%, 92%, 95%, 96%, 97%, 98%, or 99% sequence identity thereto or having at least one, two or three modifications, but not more than 10 modifications thereof;
(ii) the VH of the antibody molecule comprises the amino acid sequence of SEQ ID NO: 1512 or an amino acid sequence either having at least 80%, 85%, 90%, 92%, 95%, 96%, 97%, 98%, or 99% sequence identity thereto or having at least one, two or three modifications, but not more than 10 modifications thereof, and the VL of the antibody molecule comprises the amino acid sequence of SEQ ID NO: 1523 or an amino acid sequence either having at least 80%, 85%, 90%, 92%, 95%, 96%, 97%, 98%, or 99% sequence identity thereto or having at least one, two or three modifications, but not more than 10 modifications thereof;
(iii) the VH of the antibody molecule comprises the amino acid sequence of SEQ ID NO: 1537 or an amino acid sequence either having at least 80%, 85%, 90%, 92%, 95%, 96%, 97%, 98%, or 99% sequence identity thereto or having at least one, two or three modifications, but not more than 10 modifications thereof, and the VL of the antibody molecule comprises the amino acid sequence of SEQ ID NO: 1548 or an amino acid sequence either having at least 80%, 85%, 90%, 92%, 95%, 96%, 97%, 98%, or 99% sequence identity thereto or having at least one, two or three modifications, but not more than 10 modifications thereof;
(iv) the VH of the antibody molecule comprises the amino acid sequence of SEQ ID NO: 1583 or an amino acid sequence either having at least 80%, 85%, 90%, 92%, 95%, 96%, 97%, 98%, or 99% sequence identity thereto or having at least one, two or three modifications, but not more than 10 modifications thereof, and the VL of the antibody molecule comprises the amino acid sequence of SEQ ID NO: 1591 or an amino acid sequence either having at least 80%, 85%, 90%, 92%, 95%, 96%, 97%, 98%, or 99% sequence identity thereto or having at least one, two or three modifications, but not more than 10 modifications thereof;
(v) the VH of the antibody molecule comprises the amino acid sequence of SEQ ID NO: 1559 or an amino acid sequence either having at least 80%, 85%, 90%, 92%, 95%, 96%, 97%, 98%, or 99% sequence identity thereto or having at least one, two or three modifications, but not more than 10 modifications thereof, and the VL of the antibody molecule comprises the amino acid sequence of SEQ ID NO: 1606 or an amino acid sequence either having at least 80%, 85%, 90%, 92%, 95%, 96%, 97%, 98%, or 99% sequence identity thereto or having at least one, two or three modifications, but not more than 10 modifications thereof; or
(vi) the VH of the antibody molecule comprises the amino acid sequence of SEQ ID NO: 1619 or an amino acid sequence either having at least 80%, 85%, 90%, 92%, 95%, 96%, 97%, 98%, or 99% sequence identity thereto or having at least one, two or three modifications, but not more than 10 modifications thereof, and the VL of the antibody molecule comprises the amino acid sequence of SEQ ID NO: 1629 or an amino acid sequence either having at least 80%, 85%, 90%, 92%, 95%, 96%, 97%, 98%, or 99% sequence identity thereto or having at least one, two or three modifications, but not more than 10 modifications thereof.

35. The isolated AAV particle of any one of claims 1-34, wherein the antibody molecule comprises:
(i) a VH encoded by the nucleotide sequence of SEQ ID NO: 1563, or a nucleotide sequence having at least 80% (e.g., 85, 90, 95, 96, 97, 98, or 99%) sequence identity to SEQ ID NO: 1563; and a VL encoded by the nucleotide sequence of SEQ ID NO: 1574, or a nucleotide sequence having at least 80% (e.g., 85, 90, 95, 96, 97, 98, or 99%) sequence identity to SEQ ID NO: 1574;
(ii) a VH encoded by the nucleotide sequence of SEQ ID NO: 1513, or a nucleotide sequence having at least 80% (e.g., 85, 90, 95, 96, 97, 98, or 99%) sequence identity to SEQ ID NO: 1513; and a VL encoded by the nucleotide sequence of SEQ ID NO: 1524, or a nucleotide sequence having at least 80% (e.g., 85, 90, 95, 96, 97, 98, or 99%) sequence identity to SEQ ID NO: 1524;
(iii) a VH encoded by the nucleotide sequence of SEQ ID NO: 1538, or a nucleotide sequence having at least 80% (e.g., 85, 90, 95, 96, 97, 98, or 99%) sequence identity to SEQ ID NO: 1538; and a VL encoded by the nucleotide sequence of SEQ ID NO: 1549, or a nucleotide sequence having at least 80% (e.g., 85, 90, 95, 96, 97, 98, or 99%) sequence identity to SEQ ID NO: 1549;
(iv) a VH encoded by the nucleotide sequence of SEQ ID NO: 1584, or a nucleotide sequence having at least 80% (e.g., 85, 90, 95, 96, 97, 98, or 99%) sequence identity to SEQ ID NO: 1584; and a VL encoded by the nucleotide sequence of SEQ ID NO: 1592, or a nucleotide sequence having at least 80% (e.g., 85, 90, 95, 96, 97, 98, or 99%) sequence identity to SEQ ID NO: 1592;
(v) a VH encoded by the nucleotide sequence of SEQ ID NO: 1600, or a nucleotide sequence having at least 80% (e.g., 85, 90, 95, 96, 97, 98, or 99%) sequence identity to SEQ ID NO: 1600; and a VL encoded by the nucleotide sequence of SEQ ID NO: 1607, or a nucleotide sequence having at least 80% (e.g., 85, 90, 95, 96, 97, 98, or 99%) sequence identity to SEQ ID NO: 1607; or
(vi) a VH encoded by the nucleotide sequence of SEQ ID NO: 1620, or a nucleotide sequence having at least 80% (e.g., 85, 90, 95, 96, 97, 98, or 99%) sequence identity to SEQ ID NO: 1620; and a VL encoded by the nucleotide sequence of SEQ ID NO: 1630, or a nucleotide sequence having at least 80% (e.g., 85, 90, 95, 96, 97, 98, or 99%) sequence identity to SEQ ID NO: 1630.

36. The isolated AAV particle of any one of claims 1-29, wherein the antibody molecule comprises a heavy chain variable region (VH) comprising an HC CDR1, an HC CDR2, and an HC CDR3, and a light chain variable region (VL) comprising an LC CDR1, an LC CDR2, and an LC CDR3, wherein:
(i) the HCDR1, HCDR2, and HCDR3 comprise the amino acid sequences of SEQ ID NOs: 2200, 2201, and 2202, respectively; and the LCDR1, LCDR2, and LCDR3 comprise the amino acid sequences of SEQ ID NOs: 2207, 2208, and 2209, respectively;
(ii) the HCDR1, HCDR2, and HCDR3 comprise the amino acid sequences of SEQ ID NOs: 2232, 2233, and 2234, respectively; and the LCDR1, LCDR2, and LCDR3 comprise the amino acid sequences of SEQ ID NOs: 2238, 2239, and 2240, respectively;
(iii) the HCDR1, HCDR2, and HCDR3 comprise the amino acid sequences of SEQ ID NOs: 2248, 2219, and 2249, respectively; and the LCDR1, LCDR2, and LCDR3 comprise the amino acid sequences of SEQ ID NOs: 2207, 2208, and 2224, respectively;
(iv) the HCDR1, HCDR2, and HCDR3 comprise the amino acid sequences of SEQ ID NOs: 2218, 2219, and 2220, respectively; and the LCDR1, LCDR2, and LCDR3 comprise the amino acid sequences of SEQ ID NOs: 2207, 2208, and 2224, respectively;
(v) the HCDR1, HCDR2, and HCDR3 comprise the amino acid sequences of SEQ ID NOs: 2200, 2257, and 2258, respectively; and the LCDR1, LCDR2, and LCDR3 comprise the amino acid sequences of SEQ ID NOs: 2262, 2263, and 2264, respectively;
(vi) the HCDR1, HCDR2, and HCDR3 comprise the amino acid sequences of SEQ ID NOs: 2415, 2416, and 2417, respectively; and the LCDR1, LCDR2, and LCDR3 comprise the amino acid sequences of SEQ ID NOs: 2420, 2421, and 2422, respectively; or
(vii) the HCDR1, HCDR2, and/or HCDR3 sequences, and/or LCDR1, LCDR2, and/or LCDR3 sequences of any one of (i)-(vi), with at most one, two, or three substitutions (e.g., conservative amino acid substitutions) in each CDR.

37. The isolated AAV particle of any one of claims 1-29 and 36, wherein:
(i) the VH of the antibody molecule comprises the amino acid sequence of SEQ ID NO: 2214, 2244, 2253, 2228, 2269, or 2426, or an amino acid sequence having at least 90%, 92%, 95%, 96%, 97%, 98%, or 99% sequence identity thereto;
(ii) the VH of the antibody molecule comprises an amino acid sequence having at least one, two or three modifications, but not more than 30, 20 or 10 modifications of the amino acid sequence of SEQ ID NO: 2214, 2244, 2253, 2228, 2269, or 2426;
(iii) the VH of the antibody molecule comprises an amino acid sequence encoded by the nucleotide sequence of SEQ ID NO: 2216, 2246, 2255, 2230, 2271, or 2428, or a nucleotide sequence having at least 90%, 92%, 95%, 96%, 97%, 98%, or 99% sequence identity thereto; or
(iv) the VH of the antibody molecule comprises an amino acid sequence of any VH provided in Tables 14-16, or an amino acid sequence having at least 90%, 92%, 95%, 96%, 97%, 98%, or 99% sequence identity thereto; or an amino acid sequence having at least one, two or three modifications, but not more than 30, 20 or 10 modifications of the amino acid sequence of any VH provided in Tables 14-16.

38. The isolated AAV particle of any one of claims 1-29, 36, and 37, wherein:
(i) the VL of the antibody molecule comprises the amino acid sequence of SEQ ID NO: 2215, 2245, 2254, 2229, 2270, or 2427, or an amino acid sequence having at least 90%, 92%, 95%, 96%, 97%, 98%, or 99% sequence identity thereto;
(ii) the VL of the antibody molecule comprises an amino acid sequence having at least one, two or three modifications, but not more than 30, 20 or 10 modifications of the amino acid sequence of SEQ ID NO: 2215, 2245, 2254, 2229, 2270, or 2427;
(iii) the VL of the antibody molecule comprises an amino acid sequence encoded by the nucleotide sequence of SEQ ID NO: 2217, 2247, 2256, 2231, 2272, or 2429, or a nucleotide sequence having at least 90%, 92%, 95%, 96%, 97%, 98%, or 99% sequence identity thereto; or
(iv) the VL of the antibody molecule comprises the amino acid sequence of any VL provided in Tables 14-16, or an amino acid sequence having at least 90%, 92%, 95%, 96%, 97%, 98%, or 99% sequence identity thereto; or an amino acid sequence having at least one, two or three modifications, but not more than 30, 20 or 10 modifications of the amino acid sequence of any VL provided in Tables 14-16.

39. The isolated AAV particle of any one of claims 1-29 or 36-38, wherein:
(i) the VH of the antibody molecule comprises the amino acid sequence of SEQ ID NO: 2214 or an amino acid sequence either having at least 80%, 85%, 90%, 92%, 95%, 96%, 97%, 98%, or 99% sequence identity thereto or having at least one, two or three modifications, but not more than 10 modifications thereof, and the VL of the antibody molecule comprises the amino acid sequence of SEQ ID NO: 2215 or an amino acid sequence either having at least 80%, 85%, 90%, 92%, 95%, 96%, 97%, 98%, or 99% sequence identity thereto or having at least one, two or three modifications, but not more than 10 modifications thereof;
(ii) the VH of the antibody molecule comprises the amino acid sequence of SEQ ID NO: 2244 or an amino acid sequence either having at least 80%, 85%, 90%, 92%, 95%, 96%, 97%, 98%, or 99% sequence identity thereto or having at least one, two or three modifications, but not more than 10 modifications thereof, and the VL of the antibody molecule comprises the amino acid sequence of SEQ ID NO: 2245 or an amino acid sequence either having at least 80%, 85%, 90%, 92%, 95%, 96%, 97%, 98%, or 99% sequence identity thereto or having at least one, two or three modifications, but not more than 10 modifications thereof;
(iii) the VH of the antibody molecule comprises the amino acid sequence of SEQ ID NO: 2253 or an amino acid sequence either having at least 80%, 85%, 90%, 92%, 95%, 96%, 97%, 98%, or 99% sequence identity thereto or having at least one, two or three modifications, but not more than 10 modifications thereof, and the VL of the antibody molecule comprises the amino acid sequence of SEQ ID NO: 2254 or an amino acid sequence either having at least 80%, 85%, 90%, 92%, 95%, 96%, 97%, 98%, or 99% sequence identity thereto or having at least one, two or three modifications, but not more than 10 modifications thereof;
(iv) the VH of the antibody molecule comprises the amino acid sequence of SEQ ID NO: 2228 or an amino acid sequence either having at least 80%, 85%, 90%, 92%, 95%, 96%, 97%, 98%, or 99% sequence identity thereto or having at least one, two or three modifications, but not more than 10 modifications thereof, and the VL of the antibody molecule comprises the amino acid sequence of SEQ ID NO: 2229 or an amino acid sequence either having at least 80%, 85%, 90%, 92%, 95%, 96%, 97%, 98%, or 99% sequence identity thereto or having at least one, two or three modifications, but not more than 10 modifications thereof;
(v) the VH of the antibody molecule comprises the amino acid sequence of SEQ ID NO: 2269 or an amino acid sequence either having at least 80%, 85%, 90%, 92%, 95%, 96%, 97%, 98%, or 99% sequence identity thereto or having at least one, two or three modifications, but not more than 10 modifications thereof, and the VL of the antibody molecule comprises the amino acid sequence of SEQ ID NO: 2270 or an amino acid sequence either having at least 80%, 85%, 90%, 92%, 95%, 96%, 97%, 98%, or 99% sequence identity thereto or having at least one, two or three modifications, but not more than 10 modifications thereof; or
(vi) the VH of the antibody molecule comprises the amino acid sequence of SEQ ID NO: 2426 or an amino acid sequence either having at least 80%, 85%, 90%, 92%, 95%, 96%, 97%, 98%, or 99% sequence identity thereto or having at least one, two or three modifications, but not more than 10 modifications thereof, and the VL of the antibody molecule comprises the amino acid sequence of SEQ ID NO: 2427 or an amino acid sequence either having at least 80%, 85%, 90%, 92%, 95%, 96%, 97%, 98%, or 99% sequence identity thereto or having at least one, two or three modifications, but not more than 10 modifications thereof.

40. The isolated AAV particle of any one of claims 1-29 or 36-39, wherein the antibody molecule comprises:
(i) a VH encoded by the nucleotide sequence of SEQ ID NO: 2216, or a nucleotide sequence having at least 80% (e.g., 85, 90, 95, 96, 97, 98, or 99%) sequence identity to SEQ ID NO: 2216; and a VL encoded by the nucleotide sequence of SEQ ID NO: 2217, or a nucleotide sequence having at least 80% (e.g., 85, 90, 95, 96, 97, 98, or 99%) sequence identity to SEQ ID NO: 2217;
(ii) a VH encoded by the nucleotide sequence of SEQ ID NO: 2246, or a nucleotide sequence having at least 80% (e.g., 85, 90, 95, 96, 97, 98, or 99%) sequence identity to SEQ ID NO: 2246; and a VL encoded by the nucleotide sequence of SEQ ID NO: 2247, or a nucleotide sequence having at least 80% (e.g., 85, 90, 95, 96, 97, 98, or 99%) sequence identity to SEQ ID NO: 2247;
(iii) a VH encoded by the nucleotide sequence of SEQ ID NO: 2255, or a nucleotide sequence having at least 80% (e.g., 85, 90, 95, 96, 97, 98, or 99%) sequence identity to SEQ ID NO: 2255; and a VL encoded by the nucleotide sequence of SEQ ID NO: 2256, or a nucleotide sequence having at least 80% (e.g., 85, 90, 95, 96, 97, 98, or 99%) sequence identity to SEQ ID NO: 2256;
(iv) a VH encoded by the nucleotide sequence of SEQ ID NO: 2230, or a nucleotide sequence having at least 80% (e.g., 85, 90, 95, 96, 97, 98, or 99%) sequence identity to SEQ ID NO: 2230; and a VL encoded by the nucleotide sequence of SEQ ID NO: 2231, or a nucleotide sequence having at least 80% (e.g., 85, 90, 95, 96, 97, 98, or 99%) sequence identity to SEQ ID NO: 2231;
(v) a VH encoded by the nucleotide sequence of SEQ ID NO: 2271, or a nucleotide sequence having at least 80% (e.g., 85, 90, 95, 96, 97, 98, or 99%) sequence identity to SEQ ID NO: 2271; and a VL encoded by the nucleotide sequence of SEQ ID NO: 2272, or a nucleotide sequence having at least 80% (e.g., 85, 90, 95, 96, 97, 98, or 99%) sequence identity to SEQ ID NO: 2272; or
(vi) a VH encoded by the nucleotide sequence of SEQ ID NO: 2428, or a nucleotide sequence having at least 80% (e.g., 85, 90, 95, 96, 97, 98, or 99%) sequence identity to SEQ ID NO: 2428; and a VL encoded by the nucleotide sequence of SEQ ID NO: 2429, or a nucleotide sequence having at least 80% (e.g., 85, 90, 95, 96, 97, 98, or 99%) sequence identity to SEQ ID NO: 2429.

41. The isolated AAV particle of any one of claims 1-40, wherein the antibody molecule is a full length antibody, a bispecific antibody, an Fab, an F(ab′)₂, an Fv, a single chain Fv fragment (scFv), a diabody, a single chain antibody, an intrabody, a nanobody, or a camelid antibody.

42. The isolated AAV particle of any one of claims 1-41, wherein the antibody molecule comprises a heavy chain constant region selected from human IgG1, human IgG2, human IgG3, human IgG4, murine IgG1, murine IgG2a, murine IgG2b, murine IgG2c, and murine IgG3; and/or a light chain constant region selected from the light chain constant regions of kappa or lambda.

43. The isolated AAV particle of any one of claims 1-42, wherein the antibody molecule comprises:
(i) a heavy chain constant region comprising the amino acid sequence of any one of SEQ ID NOs: 2474-2476 or 2478-2481, or a sequence having at least 80% (e.g., 85, 90, 95, 96, 97, 98, or 99%) sequence identity to any one of SEQ ID NOs: 2474-2476 or 2478-2481, an amino acid sequence having at least one, two or three modifications, but not more than 30, 20 or 10 modifications, to the amino acid sequence of any one of SEQ ID NOs: 2474-2476 or 2478-2481, or an amino acid sequence of a heavy chain constant region provided in Table 17; and/or
(ii) a light chain constant region (CL) comprising the amino acid sequence of any one of SEQ ID NOs: 2482, 2484-2487, or 2489-2497, or a sequence having at least 80% (e.g., 85, 90, 95, 96, 97, 98, or 99%) sequence identity to any one of SEQ ID NOs: 2482, 2484-2487, or 2489-2497, or an amino acid sequence having at least one, two or three modifications, but not more than 30, 20 or 10 modifications, to the amino acid sequence of any one of SEQ ID NOs: 2482, 2484-2487, or 2489-2497, or an amino acid sequence of a light chain constant region provided in Table 17.

44. The isolated AAV particle of any one of claims 1-43, further comprising a viral genome comprising a promoter operably linked to the nucleic acid comprising the transgene encoding the antibody molecule, wherein the promoter comprises a tissue specific promoter or a ubiquitous promoter.

45. The isolated AAV particle of claim 44, wherein the promoter comprises:
(i) a chicken j-actin (CBA) promoter and/or its derivative CAG, an EF-1α promoter, a CMV immediate-early enhancer and/or promoter, a 3 glucuronidase (GUSB) promoter, a ubiquitin C (UBC) promoter, a neuron-specific enolase (NSE), a platelet-derived growth factor (PDGF) promoter, a platelet-derived growth factor B-chain (PDGF-β) promoter, an intercellular adhesion molecule 2 (ICAM-2) promoter, a synapsin (Syn) promoter, a methyl-CpG binding protein 2 (MeCP2) promoter, a Ca2+/calmodulin-dependent protein kinase II (CaMKII) promoter, a metabotropic glutamate receptor 2 (mGluR2) promoter, a neurofilament light (NFL) or heavy (NFH) promoter, a β-globin minigene nβ2 promoter, a preproenkephalin (PPE) promoter, an enkephalin (Enk) and excitatory amino acid transporter 2 (EAAT2), a glial fibrillary acidic protein (GFAP) promoter, a myelin basic protein (MBP) promoter, a cardiovascular promoter (e.g., αMHC, cTnT, and CMV-MLC2k), a liver promoter (e.g., hAAT, TBG), a skeletal muscle promoter (e.g., desmin, MCK, C512) or a fragment, e.g., a truncation, or a functional variant thereof; or
(ii) the nucleotide sequence of any one of SEQ ID NOs: 9000, 9001, 9003, 9004, 9008, 9009, 9011-9020, GCATG, CGTGAG, GT, GCTCCGGT, or GTAAG, or a nucleotide sequence at least 80% (e.g., 85%, 90%, 95%, 96%, 97%, 98%, or 99%) identical thereto or any of the sequences provided in Table 6.

46. The isolated AAV particle of claim 44 or 45, wherein the viral genome further comprises an enhancer, optionally wherein the enhancer is a CMV immediate-early (CMVie) enhancer.

47. The isolated AAV particle of any one of claims 44-46, wherein the viral genome further comprises:
(i) a polyadenylation (polyA) signal region, optionally wherein the polyA signal region comprises the nucleotide sequence of any of SEQ ID NO: 2038, or a nucleotide sequence with at least 95% identity thereto;
(ii) an ITR sequence, optionally wherein:
(a) the ITR sequence is positioned 5′ relative to the encoded payload and/or the ITR sequence is positioned 3′ relative to the encoded; and/or
(b) the ITR sequence comprises a nucleotide sequence of SEQ ID NO: 2026 or 2029, or a nucleotide sequence with at least 80%, 85%, 90%, or 95% sequence identity thereto;
(iii) at least 1, 2, or 3 intron regions, optionally wherein the intron region comprises the nucleotide sequence of SEQ ID NO: 2029, or a nucleotide sequence with at least 95% identity thereto;
(iv) at least 1, 2, or 3 exon regions; optionally wherein each exon region independently encodes a VH, VL, heavy chain constant region, light chain constant region, heavy chain, or light chain of the antibody molecule, e.g., an antibody molecule or constant region provided in any one of Tables 7-17, or a nucleotide sequence with at least 95% identity thereto; and/or
(v) a Kozak sequence, optionally wherein the Kozak sequence comprises the nucleotide sequence of GCCGCCACCATG (SEQ ID NO: 9021) or GAGGAGCCACC (SEQ ID NO: 9022).

48. The isolated AAV particle of any one of claims 44-47, wherein the viral genome further comprises a nucleotide sequence encoding at least 1-5 copies of an miR binding site, e.g., at least 1, 2, 3, 4, or 5 copies, optionally wherein the at least 1-5 copies of the encoded miR binding sites are continuous, e.g., not separated by a spacer; or are separated by a spacer (optionally wherein the spacer comprises the nucleotide sequence of GATAGTTA).

49. The isolated AAV particle of claim 48, wherein the encoded miR binding site comprises a miR183 binding site, a miR122 binding site, a miR-1 binding site, a miR-142-3p, or a combination thereof, optionally wherein:
(i) the encoded miR183 binding site comprises the nucleotide sequence of SEQ ID NO: 3675, or a nucleotide sequence having at least 85%, 90%, 92%, 95%, 97%, 98%, or 99% sequence identity thereto; or a nucleotide sequence having at least one, two, three, four, five, six, or seven modifications, but no more than ten modifications of SEQ ID NO: 3675;
(ii) the encoded miR122 binding site comprises the nucleotide sequence of SEQ ID NO: 3672, or a nucleotide sequence having at least 85%, 90%, 92%, 95%, 97%, 98%, or 99% sequence identity thereto; or a nucleotide sequence having at least one, two, three, four, five, six, or seven modifications, but no more than ten modifications of SEQ ID NO: 3672;
(iii) the encoded miR-1 binding site comprises the nucleotide sequence of SEQ ID NO: 4679, or a nucleotide sequence having at least 85%, 90%, 92%, 95%, 97%, 98%, or 99% sequence identity thereto; or a nucleotide sequence having at least one, two, three, four, five, six, or seven modifications, but no more than ten modifications of SEQ ID NO: 4679; and/or
(iv) the encoded miR-142-3p binding site comprises the nucleotide sequence of SEQ ID NO: 3674, or a nucleotide sequence having at least 70%, 75%, 80%, 85%, 90%, 92%, 95%, 97%, 98%, or 99% sequence identity thereto; or a nucleotide sequence having at least one, two, three, four, five, six, or seven modifications, but no more than ten modifications of SEQ ID NO: 3674.

50. The isolated AAV particle of any one of claims 44-49, wherein the viral genome comprises in 5′ to 3′ order:
(i) a 5′ adeno-associated (AAV) ITR, optionally wherein the 5′ AAV ITR comprises the nucleotide sequence of SEQ ID NO: 2026, or a nucleotide sequence at least 95% identical thereto;
(ii) a CMVie enhancer, optionally wherein the CMVie enhancer comprises the nucleotide sequence of SEQ ID NO: 2027, or a nucleotide sequence at least 95% identical thereto;
(iii) a CBA promoter or functional variant thereof, optionally wherein the CBA promoter or functional variant thereof comprises the nucleotide sequence of SEQ ID NO: 2028, or a nucleotide sequence at least 95% identical thereto;
(iv) an intron, optionally wherein the intron comprises the nucleotide sequence of SEQ ID NO: 2029, or a nucleotide sequence at least 95% identical thereto;
(v) a nucleotide sequence encoding a signal sequence, optionally wherein the nucleotide sequence encoding the signal sequence comprises the nucleotide sequence of SEQ ID NO: 2030, or a nucleotide sequence at least 95% identical thereto;
(vi) a transgene encoding a heavy chain variable region (VH) of the antibody molecule, wherein the nucleotide sequence encoding the VH comprises the nucleotide sequence of SEQ ID NO: 2031 or a nucleotide sequence at least 80% (e.g., at least 85, 90, 95, 96, 97, 98, or 99%) identical thereto;
(vii) a nucleotide sequence encoding an IgG1 heavy chain constant region, optionally wherein the nucleotide sequence encoding the IgG1 heavy chain constant region comprises the nucleotide sequence of SEQ ID NO: 2032, or a nucleotide sequence at least 80% (e.g., at least 85, 90, 95, 96, 97, 98, or 99%) identical thereto;
(viii) a furin cleavage site, optionally wherein the furin cleavage site comprises the nucleotide sequence of SEQ ID NO: 2033, or a nucleotide sequence at least 95% identical thereto;
(ix) a T2A linker, optionally wherein the T2A linker comprises the nucleotide sequence of SEQ ID NO: 2034, or a nucleotide sequence at least 95% identical thereto;
(x) a nucleotide sequence encoding a signal sequence, optionally wherein the nucleotide sequence encoding the signal sequence comprises the nucleotide sequence of SEQ ID NO: 2035, or a nucleotide sequence at least 95% identical thereto;
(xi) a transgene encoding a light chain variable region (VL) of the antibody molecule, wherein the nucleotide sequence encoding the VL comprises the nucleotide sequence of SEQ ID NO: 2036 or a nucleotide sequence at least 80% (e.g., at least 85, 90, 95, 96, 97, 98, or 99%) identical thereto;
(xii) a nucleotide sequence encoding an IgG kappa light chain constant region, optionally wherein the nucleotide sequence encoding the IgG kappa light chain constant region comprises the nucleotide sequence of SEQ ID NO: 2037, or a nucleotide sequence at least 80% (e.g., at least 85, 90, 95, 96, 97, 98, or 99%) identical thereto;
(xiii) a polyA signal region, optionally wherein the polyA signal region comprises the nucleotide sequence of SEQ ID NO: 2038, or a nucleotide sequence at least 95% identical thereto; and
(xiv) a 3′ AAV ITR, optionally wherein the 3′ AAV ITR comprises the nucleotide sequence of SEQ ID NO: 2039, or a nucleotide sequence at least 95% identical thereto.

51. The isolated AAV particle of any one of claims 44-50, wherein the viral genome comprises the nucleotide sequence of SEQ ID NO: 2025, or a nucleotide sequence at least 80% (e.g., at least 85, 90, 95, 96, 97, 98, or 99%) identical thereto.

52. The isolated AAV particle of any one of claims 44-51, wherein the viral genome:
(i) is single stranded;
(ii) further comprises a nucleic acid encoding a capsid protein, e.g., a structural protein, wherein the capsid protein comprises a VP1 polypeptide, a VP2 polypeptide, and/or a VP3 polypeptide, optionally wherein the VP1 polypeptide, the VP2 polypeptide, and/or the VP3 polypeptide are encoded by at least one Cap gene; and/or
(iii) further comprises a nucleic acid encoding a Rep protein, e.g., a non-structural protein, wherein the Rep protein comprises a Rep78 protein, a Rep68, Rep52 protein, and/or a Rep40 protein. optionally wherein the Rep78 protein, the Rep68 protein, the Rep52 protein, and/or the Rep40 protein are encoded by at least one Rep gene.

53. A cell comprising the isolated AAV particle of any one of claims 1-52, optionally wherein the cell is a mammalian cell, e.g., an HEK293 cell, an insect cell, e.g., an Sf9 cell, or a bacterial cell.

54. A method of making the isolated AAV particle of any one of claims 1-52, the method comprising
(i) providing a host cell comprising the viral genome; and
(ii) incubating the host cell under conditions suitable to enclose the viral genome in the AAV capsid variant;
thereby making the isolated AAV particle.

55. A pharmaceutical composition comprising the isolated AAV particle of any one of claims 1-52, and a pharmaceutically acceptable excipient.

56. A method of delivering an antibody molecule which binds to tau (e.g., human tau) to a subject, comprising administering an effective amount of the pharmaceutical composition of claim 55 or the isolated AAV particle of any one of claims 1-52, thereby delivering the antibody molecule to the subject.

57. The method of claim 56, wherein the subject has, has been diagnosed with having, or is at risk of having:
(i) a disease associated with tau expression or activity;
(ii) a neurological disorder (e.g., a neurodegenerative disorder);
(iii) a tau-related disease (e.g., a tauopathy).

58. A method of treating a subject having or diagnosed with having a disease associated with tau expression or activity comprising administering an effective amount of the pharmaceutical composition of claim 55 or the isolated AAV particle of any one of claims 1-52, thereby treating the disease associated with tau expression in the subject.

59. A method of treating a subject having or diagnosed with having a neurological disorder (e.g., a neurodegenerative disorder), comprising administering an effective amount of the pharmaceutical composition of claim 55 or the isolated AAV particle of any one of claims 1-52, thereby treating the neurodegenerative disorder in the subject.

60. A method of treating a subject having or diagnosed with having a tauopathy, comprising administering an effective amount of the pharmaceutical composition of claim 55 or the isolated AAV particle of any one of claims 1-52, thereby treating the tauopathy in the subject.

61. The method of any one of claims 57-60, wherein the disease associated with tau expression or activity, the neurological disorder (e.g., neurodegenerative disorder), or tauopathy comprises Alzheimer's disease (AD), frontotemporal dementia and parkinsonism linked to chromosome 17 (FTDP-17), frontotemporal lobar degeneration (FTLD), frontotemporal dementia (FTD), chronic traumatic encephalopathy (CTE), progressive Supranuclear Palsy (PSP), Down's syndrome, Pick's disease, corticobasal degeneration (CBD), corticobasal syndrome, amyotrophic lateral sclerosis (ALS), prion diseases, Creutzfeldt-Jakob disease (CJD), multiple system atrophy, tangle-only dementia, or progressive subcortical gliosis.

62. The method of any one of claims 56-61, wherein the AAV particle is administered to the subject:
(i) intravenously, intracerebrally, via intrathalamic (ITH) administration, intramuscularly, intrathecally, intracerebroventricularly, via intraparenchymal administration, via focused ultrasound (FUS), e.g., coupled with the intravenous administration of microbubbles (FUS-MB), or MRI-guided FUS coupled with intravenous administration, via intra-cisterna magna injection (ICM), or via dual ITH and ICM administration; or
(ii) via intravenous administration, optionally wherein the intravenous administration is via focused ultrasound (FUS), e.g., coupled with the intravenous administration of microbubbles (FUS-MB), or MRI-guided FUS coupled with intravenous administration.

63. The method of any one of claims 56-62, further comprising administration of an additional therapeutic agent and/or therapy suitable for treatment or prevention of the disease associated with tau expression or activity, a neurological disorder (e.g., a neurodegenerative disorder), or a tauopathy, optionally wherein the additional therapeutic agent comprises enzyme replacement therapy (ERT) (e.g., imiglucerase, velaglucerase alfa, or taliglucerase alfa); substrate reduction therapy (SRT) (e.g., eliglustat or miglustat), blood transfusion, levodopa, carbidopa, Safinamide, dopamine agonists (e.g., pramipexole, rotigotine, or ropinirole), anticholinergics (e.g., benztropine or trihexyphenidyl), cholinesterase inhibitors (e.g., rivastigmine, donepezil, or galantamine), an N-methyl-d-aspartate (NMDA) receptor antagonist (e.g., memantine), or a combination thereof.

64. The method of any one of claims 56-63, wherein the AAV particle is administered to the subject at a dose of:
(a) about 6.7e11 VG/kg to 2e13 VG/kg (e.g., 6.7e11 VG/kg, 2e12 VG/kg, 6.7e12 VG/kg, or 2e13 VG/kg) or about 5e11 VG/kg to 3e13 VG/kg;
(b) about 6.7e10 VG/kg to 6.7e12 VG/kg, about 1.3e11 VG/kg to 3.4e12 VG/kg, or about 2.2e11 VG/kg to 2e12 VG/kg;
(c) about 4e11 VG/kg to 8e11 VG/kg (e.g., about 6.7e11 VG/kg);
(d) about 2e11 VG/kg to 2e13 VG/kg, about 4e11 VG/kg to 1e13 VG/kg, about 6.7e11 VG/kg to about 6e12 VG/kg;
(e) about 1e12 VG/kg to 5e12 VG/kg (e.g., about 2e12 VG/kg);
(f) about 6.7e11 VG/kg to 6.7e13 VG/kg, about 1.3e12 VG/kg to 3.4e13 VG/kg, or about 2.2e12 VG/kg to 2e13 VG/kg;
(g) about 4e12 VG/kg to 8e12 VG/kg (e.g., about 6.7e12 VG/kg);
(h) about 2e12 VG/kg to 2e14 VG/kg, about 4e12 VG/kg to 1e14 VG/kg, about 6.7e12 VG/kg to about 6e13 VG/kg; or
(i) about 1e13 VG/kg to 5e13 VG/kg (e.g., about 2e13 VG/kg).

65. The pharmaceutical composition of claim 55 or the isolated AAV particle of any one of claims 1-52, for use in the manufacture of a medicament.

66. The pharmaceutical composition of claim 55 or the isolated AAV particle of any one of claims 1-52, for use in the treatment of a disease associated with tau expression or activity, a neurological disorder (e.g., a neurodegenerative disorder), or a tauopathy.

67. Use of the pharmaceutical composition of claim 55 or the isolated AAV particle of any one of claims 1-52, in the manufacture of a medicament for the treatment of a disease associated with tau expression or activity, a neurological disorder (e.g., a neurodegenerative disorder), or a tauopathy.
